United States Patent Application Publication US 2023/0087228 A1 - sequence listing, part 3

SEQ ID NO: 498 - DNA, 174529 bp, Artificial Sequence
  Synthetic Oligonucleotide
cggcgttgctgtcgaaacgcacataggaaccgtcgctgcggcggatgggccggcgggtgcgcaccacgacggcatcggccacctggccctttttgatggtgccgtccggagcagcttccttgatgtgcaccttgatgacatcgcccacgcgggcatacatctggttccggccgagcacaccaatggcggcggcgcgtttggcgccggtgttgtcggccacgtcgagaatggaacggacttgcagcataggtcaggagagtttcaggcggccgcgccggcggcgcgttcaatgatttccaccagccgccagcgtttgaggcggctcagcggacgggtttcctcaatgcgcacaacatcgccgggcttggcctcggacttttcgtcgtgcgcgtaatactttttgtaactccgcacaatcttcttgaagcgggggtgtggaaaacggcgctccacccggacgacgatggtcttggccatcttgttggaaaccacctcgccggtgcgctctttgcgacggcgggcggtgacgggggcggaaggggttgcagtggtgtcagccatagtctaaaaaatcatgcctggtttttcttgcgagcggtgatggcggtctccacgcgcgcgatgtcgcgccgcagcaaacgcatgcgcaccggattctccagccggctgccggccttctggagccggaggttgaagagttcctgtcgcaggtcgcggctcttggcctgcagctccaccagggtcaaatctttcaattcactcattttcatggcatcaatgacggtggcgggagatgaattttgtgtgaatgggcagtttggtggcggccaggcgcatggcttcgcgagccacgatttcaggcacaccatcaacttcgaaaagaacacgggcaggtttgatgacggccacccacgattccagcgggcccttgcctttgcccattcgggtttccaacggtttcttggtgtaggacttgtcagggaaaatgcgaatccacagtttgccgcgccgtttcatgaaacggctgatggccacgcgggcggcttccagttgtttggtgtccagccagcagcgctccaaggcctgcaggccgtactcaccaaacgcgacggtgttgccgcgggtggccaggccggcgcggctgccgcggtgcatcttccggtatttaacgcgtgcaggttgtaaaggcataaaacagtctcaggttaacgggcggcggcccggtcatttttggcggtttcaggcttgttttcgccgcggcaaatccagcatttgattcccaacttgccgtaaagggtgtgagcctcggcaaaaccgtagtcaatgttggcgcgcagagtgtgcagtggcacgcggccttccagatattgttccacacgcgccaattcggcgccacccaaacggcccgagcaacggatgcggatgccctcggccccctgttccatggcggtctgcacagcccgtttcatcgcgcgccggaaagagacccggcgctccagttgcagggccacgccctcggccaccagttgggcgtcgaggtccgggcttttgacttcctgaatctcaacgtaaatttccttgccggtctttttgctcagctcttctttgagcttgtcaatttcagtgcccttgcgcccgatgaccacaccgggccgggcggtgaacaaggtgatgcggcagcggttgccggcgcgctcaatttgaatcttgggcaccgcggcatccttgagtttctccttcaagtaccggcgcaattggaagtcttccaccagcagccgcccgaagtccttcttctcggcataccacttggagcgccagtcacggttgacggcgacacgcagaccgatgggattggttttttgacccataatgattagttggctccgtcggaaagtacgattttaatgtggctgttgcgtttgatgatggggccggccatgccgcgcgccttgggggtgtagcgcttgagacggctggcggtcagggcgacggcctgggccaccacgagtttggcggcctgcaattgatggttgttctccgcattggcaatcgcggaatcaagcgtccgcgccaccagccgggccgacttgcgcggcaccacggccagaacggcacgggcttccagggcggacaatccctggatttgacgggtgacttcccgcactttttgcggggacatccggacattgcgggtaatcgcctgtacttgcatagcttacttggcctcggctttggcggtgtgagcgccgtgtttcttgaagatgcgcgtgggagaaaattctcccagccggtgccccaccatgttttccgttacaaaaaccgggtggaacaccttgccgttatgcacgttgaaggtcaagcccacaaaatcgggcgtgatcatggaacggcgcgaccaagtcttgatcggggctttggacttggactccttggccgccaggatcttcttcatcaacgaggggtccacaaacggaccttttttaatcgatcgtcccataggctttcagatcaaagcagtttatttgcgtttcatgggccggccatcgcgccgaaccacaataaagcggttggaaggtttgtgtttgttccgtgtgcggtagcccttggccagcaatccccaaggcgatgtcaattgttgccagccgccaccacccttgctctttccggcgccaccgccgttggggtgatccaccgggttgcgcgccacaccgcggttgaccggccgatacccgaaataccgcgtgcgcccagccttgccccaaacaatgttttcatgatcggcattgcccacctcgccaatggtcgcatagcagttttcgtgaacgcgccggatttcaccggacggcaaccgcaaggtggcatagccttgatcgcgggacatcaaggtggcggagctgcccgccgagcgcaccatctgcgccccacgaccgggcaccatctcaatgttatggatggccatgccgatgggaatgtttttgagcggcaaatgattgcccacttccaccggagcctcaggcccgctggaaaccttggcacccaccttgagatccttgggcgccaaaatgtaagacttggcaccatccggatacttgatcagcgcgatgcgggcggagcggcaaggatcgtattcgatggcctccacagtggccacctggccatgacgccggcgcttgaaatccaccagacgaattttttgcttgtggccgccgccaatgccgcgtgcggtgacgcgcccgtagcagttgcgcccgccagtctttttgcgggtcaccaccaggctcttctccggctccaccttggtgatctcgctgaagtcggccaccgtgatgtagcggcgcgacggcgtcaaaggtctaaatgttttaacaggcataaggcaaatgtaggttaggtgaggttgatgcggtcgccttccttcaacgtgacaatggccttcttccaatcactggtcatgccggcctggggtgtgcgttgacggcgcaatttgccgcgcatgttcagcgtgttgacggcaaccaccttgaccttgaacaactcctccaccgctttgcgaatctgggctttgttggcccgggggtccgccaccacggtgtattggttgtgcttctcggcctgcagggtgcccttctcggtcacgcggacggtcttgatgatttcaaaggcattcatggtgtcaggattggctgaggcgctgtcccacctgcgccagagcagcgcgtgtaaaaacgattttggccggtttgagggcctggtaacaattcaagtctgcgccggtgaccagttccacatacggcaggttgcgggcagccaggcgaaggttctggtcaatggtgtcggtcaccaccagcacggtctggccgggagccagagtgtccagcaaccgcaccagctcgcgcgtcttgggctgggccagtttcaattcttccaccacgatgacttcactggccttgatgcgctcgctcaaagccttgcgcagggccaggcgccgggtggagtcattgacttttttgctgaagtcgcgtggcttgggaccaaagaccacaccaccaccacgccacaagggcgactgaaacgaaccggcgcgggcgcggccagtgcctttttggcgccagggtttcttgccggtgccggccacttcacccatggtcttggtgcaggcagtgccggagcggcgggcggccaggtgggccaccaccacatcgtgcacagcctgcgtgcccttgccgttttcaataatcgggaaagggacttccacttcgccctgcggcgaaccttgcaaatcttgtacggtgagcttcatgacgggtctcctcacttcttggcggccttggctttaccgcccttggccatggccttgtgtttctcgatgcgctcctggcgggccttctccaacacgcgggagcgcttcttggactcgcgaatgatgacgtagtccccctcggccccgggcatcgagcccttgatgagcaaaagattttcagcttcgcgcacctggatgatttgcaggttttgcacagtgcgccgcacctgtcccatgtggccgggcatcttcatgccgcggttaacggtgccggggaacaaacggcagccaatggcgccgctccgacggtgccagcccttggcgccgtggctcatgtcgcccccgcgaaaatgatgccgcttgaccacgccctcaaaaccacggcctttggtcacgccgatggcatccacgtagtcaccggcccggaagatgttcactcccaaggtgtcgcccggtttgacctccagttcaaagtcgcgaaattcgcggatgatccgaacgggcgagccgttgtgctttttgacgtggccctgcagcggcttggtgaggcgggactccttctgctcgccaaagcccagctgcacggccttgtagccgtcgcgttcgtgggtcttgcattgcagcacgcggttggggccggcctgcacaatggtcaccggcacgacgacaccgttggcgtcgtaaacgcgggcgtgccccagttttttgccaagcaaaccaatcatagagacttagattttaatggtgatgtcaacccccgccgggagggtgagttttttgagctcgtccacggtcttggcggtcggttcaatgatgtcaatcaaccgcttgtgggtgcgttgttcaaaggtttcctgggacttcttgtcggcatgcggcgagcgcagcaccgtgaaccgctcgatgcgggtgggcagaggaaccggcccggccacgcgggcgccggtgcgcttcaccgtttcgacaatttcgtgcgccgaggagtccacgatccgataatcgtagcctttgaggcgaatccgtatgcgttgtccaggcatataaagaacaagttaagagtttctgttttacgtccgggctgcaggcttgtttttggcctgatccaaaagttgagcggcaatgctgctcggcacctgctcgaaagtgagcggttccatcgagtaggaggcgcggcccttggaaaggctccgcaccgccgtggcatagccgaacatctccgccagcggcacgcgggccgtcaagacggtggccccgttgcgcacttcgatgtgctccacgtgaccgcggcggcggttgatgtcacctaaaatatcaccctgatactcgtcgggggtggtcacctcgactttcatcacgggctccaaaagaatgggattggccttccggaaagcctctttgagcgcaaagatgcccgccatcttgaacgccaactcgctcgagtccacttcgtggaaggtgccgtccacaatcgccaccttgatgtcaataatctggtaaccggcataaacaccggtgcggacggcttcctcaatgccgctgataaccgccggaatgtattccttgggaatggcgccaccaacaatcttgctctcgatttccacacccttgccgcgctcattcggctcgatgtggatgatggcgtggccatattggccgcgcccgcctgattgccggatgaatttgccctcgccctcggccttggtggtgatggtttcccggtaggcaatctgcggcgccccggcattggcctgcacattgaactcccgataaaggcggtcccgaatgatttccaggtgcagctcgcccatgccggcgatgatgagctgaccggtctcttgattcgtgaaaacccggaaagtgggatcttcctcggccaaccgttgcagcccctcggtcaatttgtcgcgatcgcccttggtcttgggctctatggccatgctgatgaccggttcggggaacgtgggcggctccagcagcacactgaaatcttcgtcgcacaacgtgtcgccggtggtgatgttgcgcaggcccaccagcgccgcaatgtcgccggagaaaacctgctccacgtccaggcgcttgtcggcctgaatcatcatcaaccggttgacgcgctcacggcggcgtgtgcgaggattgtaaatgatgtcgcctttcttcaacgtgccgctgtacacgcggaagaacaccagcttacccgcgtaggcatcggtccacagcttgaatgccagcgcgcaaaactgcgcgttgtcatccgccgccaccatcaatggagtgtggtcgtcgggattctcaccttgagcgggcggcacatccagcggactgggcagataatccacaatggcatccaccaagggttgcacgccgcgcttgcggaatgcgctgccgcagagcaccggcaccagctccaaattgcaggtcagtcgccggatggcagctttcagggtcagagcgtcaatcggtttttcctcgatgaccagctcggcaatggtgtcgtccttgttgctgacggcgtcaatcaattcagccagggcggcggcagcacgctcgcgcagttcagccgggatgtcggtgatggtgaagcggacacccagatcatcctcaggatcgtaaatgatggccttttgattgacgacatcaatgacgccccgcagatggtcctccttgccgatgggcagcacgaccgggtaggcgtaagcgccgagcttgcggcggaggtcgttcagcgcgttttcaaaattcgcgccggtccggtccatcttgttgatgaaggcaatccgtggaacgcgatacttgctggcctggcgccagaccgtctcggattgcggttggacaccggccactccacaaaacacagccacggcaccgtcaagcacccgcatcgagcgctccacttcggcggtgaaatccacatggcccggagtgtcaataatgttgatgcggaattcctggccggcaaaaagcttggcgcaaccgtcttccttgggtttccagtaacaggtggtggcggcggaggtgatggtgatgccccgctcccgctcctgctccatccagtccgtcaccgtgttgccatcatccacatcgcccatccggtgaatgaggccggtgtagtaaagaatgcgctcggtggtcgtggtcttgccggcgtcaatgtgcgcggcaataccaatattgcgcgtccgggccagtggataaggccggttcggcgcatcgagcactttcttttccgtcgcagtttccatgcaaaatttttaccgtatcagacaataaaaacgccccgattttcagcgcagccgacggggcgtcccagtgagcaccactaccagcggaaatgggcaaaggccttgttggcctgcgccatccggtggacctcgtcgcgtttacgaatggcgttgccctgcccctggtaggcatccataatctcggcagccagggcctcgcgcatcgccacacccttgcgggcatcggcgaaatccaccatccaacgcatcgccagagaaatctggcggtcgggcggaacttccaagggcacctgataggtggcacccccgacgcggcgggccttggtctcaatgcgcggcttggcattgtccaccgcgcgctggaggacctccagtggattgatttgcgggttcttggccaccaattggtcaaaagccccgtaaacaatccgctgggccgtgctcttcttgccccatttcatcacagtgttgatcaagcgggtgaccaacacgctgtggtacttcggatcttcggccatcggccggcggacagcttgacgtcgtcgagacataattccaaaaatcctcaggatttcgccggagcggctttcggccgcttgaccccgtacttggagcggctcacgcggcgtttctccacgccggccgcatccaaggttccacgcacgatgtgataacgcacgccgggcaaatctttaacacggccaccgcgcaccagcacgatggagtgttcctgcaggttgtggccctcatccgggatgtaggcaatgacctcatacccgttggtgagccgcaccttggccaccttgcgcatcgccgagttcggtttcttcggcgtacgcgtcatgacctgaatgcagacgccgcgccggaacggcgcgccctccagggccggcgccttcgacttggtggcgacctttcggcgtccaaaacggacgagctgattaatcgtcggcattattgtaaattccgtgttgtgctttcttcaacgtccttccccgggagaggaaaggagcgcggatattagcaaagcattttcaggttgcaacaagtatttcaaaaaaatttttttcttgacaacttattctccatttccggagtcctccgcagccgcttccccggccggagcttcgcctgccgcggcagccggctccgccggcgcaggctccagctccaccagcggcttgagctgcacattccgatgcgccggataacccgtgcccgcaggaatgatgtgccccatgatgacgttttccttgaacccgcgcaggtagtccacacgcgaagtcgtggccgcctcggtgagcacccgcgtcgtgtcctggaatgacgccgcgctgaggaaactctccgtttcgagcgaagccttcgtgatgcccagcagcaccggctggcactccgcaggtttgccgcccagtttctccacccgctggttttcctcttcgtgctccagcttgtccacctgctcgccccacaggaagcgggtgtcgcccggctcagtgatgcgcaccttgcgcagcatctggcgcacgatgatttcaatgtgcttgtcgttgatggtgacgccctgcaggcggtacacctcctgcacttcgttgacgagatgctcctgcaactgctgcgcgccgcagacctcgagaatttcgtgcgggtcaatcggtccttccgtcaactgctggccgcgcttgaccatgtcgcccttgaacacgatgacgtgcatgccgatggggatgaggtgctcctccttctggccggtcatcggatcggtgatgatgatgcaccgcttgccgcgcaccgtcggaccaaagtccaccacgccgtcaatcttcgaaatttcggccgcatccttcggccgccgcgcctcaaacaactcggccacacgcggcagaccgccggtgatgtccttggtcttgctcaccttgcgcggggtcttggccagcaacgcgccagcctcgatgatgtcgccttcctccaccacgatgtgcgcgcccgaaggaatgccgtagctggcaatcacatcgcgaccgtcttcatccaaaatgatgatttgcggatgcaaatcttccttgtggtcaatgataaccttggcctgctgcccggtcgcctcgtcctcctcctgcttcatcgtcacaccttcaatgatgtcgtggaagcggatgcggccggctttttccgaaatgatgggcacgttgtacggatcccattgcacgaaggcctcgcccttcttcacccgcccgccatcggggacggaaatgaccgagccgatgaccagtgtgtgactctccagctcgcgcccatcctcgtcctgaacgatgatgctgccgtttttgttcagcacgatatggttgccgtcctgcagcggcacacaacgcagatcattgtacttgatgataccgtcgtgtttggccttgatttgcggctgcttgaacacctgcgacgccgtgccaccgatgtggaacgtacgcatcgtcaattgcgtgcccggctcgccgatggactgcgcggcgatgatgcccacagcctcgcccagcttgaccatctgtccggtcgccaggttccgtccgtagcagcggatgcagacgccgtgtttgctctcgcaagtcagcaccgagcgaatcttcacgcgctcaatgccggcgtcttcaatctggcgcgccttgtcctcgtcaatctcttcattcgcagccacgaggacccgtttgggatcgcgcgggtcgtaaatgtcatcgcacgcgcaacggcccaccaggcggtcacgcagtttgacgatttcatcttcgccctccaggatggcctgcacccagatgccgttgaccgtcccgcagtcttcttctcgcacgatgacatcctgcgccacgtccaccagcttgcgcgtcatgtagccggagtcggccgtcttgagcgccgtgtccgccaaacctttgcgcgcgccgtgagtcgaaatgaagtactccaacaccgtcagcccttcgcggaagttcgagagaatgggcttctcgatgatgtcgccgctcggcttggccatcaaaccgcgcagaccggccaactgacgcacctgttgcttgttgccacgggcgccggagttgaccatgaggaagatgggattgtactcggacttgttccggttgcgctccaaggtctgaagcatgaccgttgaaatctggtccgtgcaatgcgtccagatgtccacaatcttgttgtagcgctcgccgtcggtgatcacacccttccggtactgtttctccacctccgctatctgcttctgcgcctcgcggatttgcttctccttttcctccggaatgatcatgtcctcgatgccgatggacacaccggcccgcgtggcctcgcggaagcccagctccttgagccggtccaaagtggcaatcgtctcctcatgcccgcaatacttgtagcaattccaaatcaaatcgcccaattcgttcttgccggccaccttgttgaaaaagcccagcttctcaggccacacttcgctgaagatgacccggcccacagtggtctcaatcaccgcactcttcggatcgccatacaccgtctgacgcccgcggtcgggattggccagccgcacccggctgtgcgtcttcaattcaccctcgcgataagcgaagatgacctcctccttggaaccaaacagcatcaggcgctgattgcctttgggctggcgtggctccgcggtgaggtagaagcaacccagcgtgatgtcttgcgtcggcgtcataatcggccggccgctcgacgggctgaaaatgttgttgggcgccatcatcaacaggcgcgcctccatctgggcctcgatggacagcggcacgtgcacggccatctggtcgccgtcgaagtcggcgttgtacgccgtgcagaccagcggatgaatccgtatggcctcaccttcgatgagcatcggctcaaaggcctgaatggacagccggtgcagcgtcggcgcgcggttgagcaacaccgggtggcccttggtgacttcttcaagaatgtcccacacctcggtggactggcgctcaatcaatttcttggccgagcgcaccgtgtgcacatagcccaattccttgagccgccggatgatgaacggctcaaacagcaccagcgccatcttcttgggcaaaccgcactgatgcagcttcagctccggcccaatcacaatcaccgagcgaccgctgtagtccacgcgcttgcccagcaggttttgacggaaccgcccgctcttgcccttgagcatgtcgctcagcgacttgagcggccggttgccggcaccggtgaccgcgcggccatgacgcccgttgtcaaacaaggcatccaccgcctcctgcaacatgcgcttctcgttccggatgatgacctccggcgtcttgagctgaagcaggttcttgagacggttgttgcggttgatgacacgccggtacaaatcattcaaatcggaagttgcaaaccgcccgccctccaacggcaccaacggccgcaaatccggcggaatcaccggcagtaccgtgagaatcatccactccggcttgacgcggttttccacaaacgcaccaagcaaacggatccgcttggccagtttcttgcggatttgcttgctcttggtctcctgcatctgctgctgcagcttttcaatctggcgcggcagattgacgttggccagcgcctcacgcacggcctcggcgcccatcttggccacaaaggcatccggcccgtaagtctcgcgagcttcgcgatactcatgctcgctgagcagttggtggagttgcagcggcgtgttgcccgggtccaccaccatgtaatcctcgtaataaatcacccgctccaagtcccgcgccgtcatgtccagcaccaagccgatgcgcgagggcatgcacttgaaaaaccagatgtgcgataccggcaccgccagctcgatgtggcccatgcgttcgcgccgcacccgcgccaacgtcacttccacaccgcaacgatcgcacaccaccccgcggtgtttaatccgtttgtacttgccgcaggaacactcccagtccttcacaggaccgaaaatgcgctcgcaaaacaggccgccacgttcaggtttgaacgtgcggtaattgatggtctcggggttttttacctccccttttgaccaggaacggatggcctccggtgaggcaaccgagatggcgacgtaatccacctggttgaccttgtccagtccgagcagctcgcgtgctgtttctttcgtattcatgttggctgtggcattggtggggcggaaaaatcccgccccgggtctgcaaagttcaattacaagttggccagggcgctggccggcgtggccggttgatgttcaatgggattggtgtaccccaccttcacgtccagccccagggactgcatttccttgaccagcacgttgaaagattcagggatgccggcctccaaacaattgtcgcccttgacaatgctctcgtagatacgggtgcggccctgcacatcgtccgacttgacggtgagcagctcctgcaacgcataggcggcgccatacgcttccatggcccaaacttccatttccccgaagcgctgaccgccgtactgtgccttgccgcccagcggctgctgggtgaccagcgagtagggacccaccgcgcgggcatggattttgtccgccaccaggtggcccagtttcatcatgtagatgtagcccaccaccacttcctgatcgaacggctcgcccgtccgcccgtcgaacagacgcgccttgccgttgggcaatagcccctgctccttgcccacgggcgtttgcgccgcctgtttgatgaactcccaaatgtctttctccttgatgccgtcgaagaccggcgtcgcaaatttcaatcccagcagcttcgcagcgtaccccaggtgcgtttccaacacctgacccacattcatgcgcgacggcacacccagcggattgagcacaatgtccaccggcgtgccatcggccaggaacggcatgtcttcctccggcacaatcttggccacaacacccttgttgccatggcgtccggccatcttgtcgcccaccgacagtttccgcttcgaggcgatgtacaccttcaccatcttgatgatgccggcgtcaatttcatcacccgcctccacgcgctccatctcctgatcgtgctgggcctgcaaatcatcaaacttctttttgaagccgccgatgatctcattgatcttgttgcggatgggcgaaggatcaatctcgatccggtcatacacctgcgccagcttccgcaacaacgtcttggtaatcttgcgattcgccggaatgatgatttcaccggtctcgctgttcaccacgtccagcggaattttctcgcccagcaagatattgctcagagcctcggtcagttgctcccgcagctcttccatcttggtgcggtattcctcctgcacctgtttggcggcacgacgcgcaccgcccgtctccgcctgcacctctttttccccttccttctccttcttggcggagaccttgacatccatcacaatgccataagtcccgctcggtactttgagagaggtgtccttcacatcggcggccttttcaccgaagatggcccgcaacagccgctcctcgggcgccagctccgtctcgctcttgggcgtgatcttgcccaccaaaatgtctccgggcttcacctccgcgccaacgcggatgacaccgtccggccccaggttcttgagggcttcctcgccaagattgggaatgtcacgggtgatttcctccggacccagcttggtgtcgcgcgcgctcacctcaaactcgtcaatatggatggaggtgaaaatatcctccttgacgatgcgctcgctgatgaggatggcgtcctcgaaattgtaaccgttccacggcatgaaggccaccaacacgtttcgtcccaaggccagttcaccctgagccgtgcagggaccatcggcaataacctgccctttcttgaccgtgtcacccttgttcaccagcgctttttggttgatgcacgtggcggcgttggagcgcatgaatttgcgcagtccatacacgtacacgccattggccggatcgtgtttgatcttgcgcttgccctccggcagcttgccatccgcagtgatgatgatttggttgcccgtcacgctggccaccttgccgctctcctctgccaccaacacagcgcgggaatcccgggccacacgctcctccaaaccggtggccaccagtggcgtctcggtcaccagcaacggcaccgcctgccgttgcatgtttgaacccatcagcgcccggttggcgtcgtcgtgctccaggaacggaatcaaactggccgccaccgaaaccaattgcttcggcgacacgtccatgtaatccaccttcgccggctccacgtccacgaaatcgcccttgcgacggcacgtcaccgtggcggtggtgaagtggcctttttcatcaatcggcgcattcgcctgcgccacggtgaagttctcctcccggtccgcagtcagatactcaatttcatccgtcacacggcccttgaccaccttgcgatagggtgtctccaaaaacccaaactcgttcacccgcgcaaacgtcgccagcgaggctatcaagccaatgttcggaccttccggagtttccaccggacaaatccgcccgtaatggctcgggtgcacgtcgcgcacctcaaacccggcacgatcccgcgacaaacctcccggccccagcgcggacaaacgccgcttatgcgtcagctcggccagcggattaatctgatccatgaattggctaagctggctccgcccaaagaaatcgcgaatcaccgccgacaacgccttgggattgatcagcttctgcggcgtcatcgcctccaacgactggtcaaacaaagtcatgcgctccttgaccagccgctcggtgcgcgccaggcccacgcggcattggttggccagcaactcgcccaccgtccgcacgcgccggctgcccaggtggtcaatgtcgtccaacgttccctcgcccttcttcaggcgcagcaaatacttggtggcctccaccaaatcgctcttggtgaggatgcgcgtgtcgttcttgggcaggttgagtttctggttgatcttgtaacgccccacgcgccccaagtcatagcgtttgggatcgaaaaacagccgcttgatgagcgctcgtgcattggccgccgtcggcggatcccccggccgcaaccgccggtaaatatccttgagggcctcatcctcgttcttggtcgggtccttcttgatgcatttgatgatgatgccgtcgtccactgacgtgtccaccacccgcaacaccttgacccccagctcgccaatctgcttcaccaccgcacgcgacaacggctcaaaagcccgcgccacaaccaaccccttgtcctcatccaccacgtcctcgatgagcaccttgttgggaagatcatcgcgtttctcagcttctttgatgggcagctcttcaatggtgtaaaaaagcttcaacaactcggcatcgctgccacggttggcgtcccctttgcccttttccggctcgtccaaaaatgccagcgcacggaagaaagtcgtggtcaaaaatttgcgacgccgcttcttgcggtccagatacacataaagcaaatcgctcgtgtcaaactgcgcctcgtaccatgaaccgcggtcggggatgatgcggaaagaatgaagcgtcttgccgttgggatgctgggttgcttcaaaagcaatacccggcgaacggtgcaactggctgacaatgacccgctcggcgccgttgatgacaaaactcccctgcggagtcatcagcggcagctcgcccatgaacacttcctcttcgcgggcgaccttgccgttttcctccaaacggaaagtgacatggagcggtgcgccgtaagtctgcccttcgcgcaggcactccagccacgtcatcttgggctcgccaatcttataagaggcaaagtccagcttgaacttgccgtcgtagctctcgaccggaaacacctcccggaacaccgcctggaggcccacgtctttgcgtcgtcccggcgggacatcagactgcaaaaactccttgtaggaggtggtctgcagttcgataagatccggcgggttgatcacttctttaatcttgccgaaattcttgcgttcgatggctcgcgttgacatgggacttgctctattgggccggcggcatgtacagcctgtacatcccgacagccgggttcgggcttagacagcacaaggcgagtccccccttcccggggagtgctcgccaaaacatggatgaatccaaccgatactacgacttttatcttgccagtccgccctgccggccgcccgcaaaccggacaaccggccgaaggggggcgccacccggcgccacccctccagcggacaattacttgagttccacggatgcgccggcctcttccagcttcttcttggccgcttcagcatccgccttgttggcgccttcaagcaccggcttgggagcgccttccaccagcgccttggcttccgccaatcccagaccagccttgatctcgcgcaccgccttgatgacggcaatcttcttgtcggcaggcaccttggccaggatcacgtcaaacgtatccttggcctcggcaggcgccgcagcagcagcaccacccgccggggcagccccagccgccgccaccgctaccggcgcagccgccgtcacaccccatttggcttccagttctttcaccagctccgcgatctccaatacggtcgcgttgctcagttcttccacgatttttgctttatccagtgccataggtcctttctgtttcgccgcccggcgtggccacgccggatttcagcccgctgcccgcaggccggcgagttacatgttaggttgttgactttttccccagccgttggctgcagcaggagaaaaactgtgatgttaattctctcgaaaaaggcttgctcatgccgccgcaggcgcgccttctttttgcgccttggcctgcagtactcgcgccagttgcgatgccggcgtgttgagcagcgccaccagcttggtggccggcgcctgcaacagacccagcaacttggcctgcaacacctcgcgcgacggcaaatccgccagcgccaaaaccatggacgcttccaaccgctgattgttcaaatatccaaagcggattttcggcttgtcctgctccgcagcggcaaacgtcttgagcgccttggccgccaaggtcacatccttcttcccggtcaccaccgccaccggcccctccaagggcccaggaagctccacccccgccgccttggcggcatgccgaaacaggctgtttttgaccacatgaagctccgcacccgcctccgccaattggcggcgcagggtcgtaagctgggccactttcagtccggtatagtccaccgccacaaaaaacggagacgcattcaaccggttgagatattcctgagttaaattttgtttttcagcacgcatgatgattccctccgctgcaggcttgcgttatgtggtggcgaactccttcaagtccaccggcaccggcggactcatcgtcgtggagatggtgcagctcaaaatgtagcgccccttcacactcgaaggccgcgccttttgaatcgcctcaatcaccgtccgggcgttttcctcaatctgctcgggtgcaaaattaatcttgcccaccggcacatgcacattaccgcccttgtccaccttgaactccacacgacccgccttgaactccttcaccgccttggcagtgtcgtcggtcaccgtgccggtcttgggattgggcatcaaaccacgaggaccaaggattttgcccagtttgcgcacttcggtcatcgcctccggcgtggcaatcgcaatgtcaaattccgcccagccttcctggcacttcttaatcatgtcctcaaagccgacatactcggctccggcggcttttgctgcctcggcggaagcgccgctcttggcaaacaccagcacccgcaccaccttgccggtgccatgaggcaacggtacagtgccgcgaatcatctggtcactttgcttcgggtccaccccaagatgaaacgccaaatccaccgtctctgtgaacttggcccggggcattttggccaacagcgccaccgccgccttcagcggctgcgccttcttgccatccagcaggctcagggccttcttgtatcgtttgctgcgttttgctgccatgttaatggttgcggtacaatcgagggggactccctctcccgcgttggtttgttgttagtccacgatttcaatacccatgttgcgggccgttcccgcaatcatgcgaaacgccgcctcctccgagttggcgttcaaatctttctgtttgatcttgacaatctccatcacctgcttgcgggtgactttgcccactttttccttgttcggcaccttcgagccggtggcaatccccgctgccttcttcaacaaaaccgacgccggcggcgacttcgtgatgaaggtgaaggacttgtcctgatacaccgtaatcaccaccggaatcgtcatgcccgcctggctctgcgtcttggcgttgaattccttgcaaaacgccatgatgttcacaccatgctgacccagggcagggcccaccggcggggccggattcgcctggccggcggtgatttgcaacttaatctgtccaacaactttctttgccataaatcaatcttcgtcctgtccgcaacgcttacgttttttccacctgccaatactccagttccaccggggtgttgcgtccaaaaatgttcaccgtcaccttgagcttgcctcgctccggctcaatttcctcaataaccccgctgaaattcaggaacggcccgtcgttaatcttcaccgtctcgcccacttcaaagttgaccttcggcttctccacatcctccgactcgctgatttgagccttgatgctctcaatctcctcatccgccgtcggcgccggacggtcccctccaacaaacccaatgatgccctgcgtctcgcgtatgaaataccacgggcggtcaatcacccggttgttctcatccaggagcttcatccgcaaaaacacgtacccgggataaagcttgcgggtgctgacggtctttttgccgccacgcacatccacaatcttttccatcggcaccaatacctcctcgatgtattcctgcatctcctccgccttgatgcgcttctccaggctctccttgaccttgagttcctggccggcaagggtgtggaccacaaaccactggctcttggatgagggcataaactcgaaaaaggggcgttaaacagtggtcacaaaccgcatcaccaaaagcagcaccgaatccaccacaatggtgaacaggctcaacaaaaccaccgacaccagcaccaccaccgtgctgcctttcaactcctcacgaccaggccaggtgcatttgcgcaactcctcccgcgtctcctgaatatactgattcaggcgcaaaaaatgccctttccgccagaggtagaacaccacggcggccaaggcagccagcccgattatcttcaaaatttcacctgtttccatatcagtctcctgacttggcggagagggagggattcgaacccccgtcccgcgatgcgggaagcggttttcaagaccgccgcattagaccactctgccacctctccggcaaaaaaactggcagggcgtgagggactcgaacccccaacaggcggttttggagaccgctactctaccaattgagctaacgccctgttgccgcagagattgttgctcactgtctctccggtcgcttgccggtggttcgcaccgggcgccccgccacgccggcaggacgcccgcgcctgtcaaactgttcgttaatccaaaatttccgtgatacgaccggccccaatggtccgaccgccttcacgaatcgcaaaacgctgcaacttctccatggccaccggcgcaatcaccttgatctccatggacacgttgtcgcccggcatcaccatctccacgccctgcggcagcgtcaccgtccccgtcacgtcggtggtgcggaaatagaactgcggacgataattggtgaagaacggcgtatgacggccaccttcttccttcgacaacacgtacacctcggccttgaagtgcgtgtgcggcgtaatcgaacccggcttcgccagcaccatgccgcgctccacctcttccttcttcacaccgcgcagcagcacgcccacgttgtcgcccgcctgcgcgctgtccagcagcttgcggaacatttcaatgtccgtcgccaccgtcttgcgcgtctcacgcaaccccacgatttccacttcctccatgcgcttgagcacaccgcgctccacacggccggtcaccacggtgccgcggccttcaatgttgaacacgtcttcaatgcacatcaagaacggcttgtccacttcgcgcgtgggcagcggaatgtaatcgtcaatggcctggagcaggtcttccacagccttgatgccctcaggcttcaattccatggcggcgcgggagctgccacggatcaccggcgccttcgctccgtcgaaaccgtacttggtcaacaagtcccgcacttccatctccaccagctccagcaaatccttgtcgtccaccaggtcaatcttgttcaaaaacaccacaatcgccggcacacccacctggcgggccaacaatatgtgctcgcgcgtctgaggcatcggaccctcggcggcatccaccaccagaatcgcgccgtccatctgcgccgcgccggtgatcatgttcttgatgaagtccgcgtggcccgggcagtcaatgtgcgcgtagtgccggttgttgctctcgtattccacgtgagagaccgcgatggtcaccgtcttggtttcgtcacgcaccgtgccgcccttggtgatgtcggcgtagctgatcggcttggccaaccccttttgggattgcacatgcacgattgcagcggtcagcgtggacttcccatggtcaatgtgcccaatcgtccccacgttgacgtgtggcttcgtacgttgaaattgctcttttgccatcgcagttcctacggttgatgtttacggtttttaacaactgtttcgggcggccatcgccgccacactttttttcatggagcccatgatcaggattgaactgatgacctcgtccttaccaaggacgcgctctgccaactgagctacatgggcatccatgtatcactttcctgtcattgtaaaagacaaaactcccgtcagaccctgtgcttcttcccgaaaaacccacagggactaacgtagtcgtcctgtaataggcccaatgacgccggggaaattacgcccctgcaaaaaaattgtcaaagctttttttccactttttttccctcaccttgccccacttccaccgcctccgccacccggccatcccaccgccgcatcaaatggttgcccgcccaaatgaccatccccgccatcaccaaccccccgggtatgtccaccgcataatggtagcggcaatacaccgtgctcaaacacaacaaaaccaccaccaccgcatgcgcccaccgtattccacgaatatagcgccatgaaaaatacaacgtcgtcaccgccaccgccacatggctgctcggaaaggccgcccccggcgtctcaaaatgatgataaatcagcgccatgatttgaaaaaacggccccttctgcaccgccgccggaaagtcaggcaccgtcgtcggcatcaccgccgccggcaaatcaaaatccccaaaatcccggtaaaaaatccgcgggcccaccaccggcaaaaagatatagaccagaaaacacgcataaaaaaccaccgaaaccagggtgatgtaatggaaaaattgcctccgatcttgccggtacaacgccagcccacaccccgttatcatgatataatacgaaaaataagacacataaaaaacctcactcacccacaggtacggcagtttgtccatgaacagcaaactcggctggcacccaaacaaccgttcctccatccggatgaaccacgggtccaacatccccgtggcaaacatctgattcaaatgccccgtctcattgtaaatcgggacatacaacatgatgggataaaaatgccggacaaaccgcagcaatgccccatgtcggcccgtcgcttcttcacatatcaacaaatgaatcatccccaccaaccccagatgccccaacaccaaccaccgccactgcggcactgtttcattgtgaaagataagcaccaacaaccccaccaaggccacatacccctgggtcgccacatcaataaaacgataatgcctcatgcctcccaacctcccctcatcccaaccaccccgcctcacgataccaatccaaagtggccggcaccccttgcgccgcagccgtgggcgcctcaaagcccgtcatctcccgcaaacggctcacatcacacacccaccccgccgcggcaagttccttgtatttctgcaaattcaccacattgggacggcgggtgatctgcgaaatgatttcctgaaccgcgcacaccggccacaaagccgccacaggcaaggccaggggaaacggtttgactccccaatgccgcgccgccaactctcccagttgccgtacattcaccacctccggatgcgccacgtgaaacacctgtcccaccgcaccctcatgcgtcaaacaatgcacaaccgccgccgccaaatccggcgcatataccaagctcaactgctggcgtcccccgccaaagcacggcaacacaccgcgccgcaccgccttgaacaacttgaaaaactcaccatcccgcggcccataaacacccgggggtctcaaaaccaccgccggcacacggcattgctcccgcaccacctgctcggcggccagcttgctcttcccgtaatcggtcaatggcctcggtggatccgactcccgcgccggccgcgccgccgtggccggccccgtaaccgccaaactggaaatgtgcaccaaccgttgtacttccgatgcacgacgattgatggccgccaccaagttcaaagtgccagcatgattgatttggaaataaccctccctgtccagcgccttggtggcccccgcgcaatgcaccacatgcgtcaccccctccagggccgaccccaaagattccgccgactccagcgatccctccccaatttccaccttccccaagtgcccctgcaaccacttccgcgggctgctggaccgcagcagcacccgcaccggccaacccgcccccacaaggcggtccagcacgtggctgcccaccagcccgctggcgccggtcaacagcactttcatggtcggctaaatcagccccagttcacgccccacctgggcaaattgttccagcgcaaaatctatttgcgcatcggtgtgcgtcgccatcaagctcaccctcagcagttccatcccaggcggtatgcccggagaaaccaccggattcacaaacaccccccgctcctgcaatcgcttgcaaaactggaacgtcttgagcatgtcccggatatacaccggcaatatcggcgtctgcgatcctcccaaatcaaaccccagcgacaacaacccccgcttcatccgctcggtgttctgccacaaccgcgcaattcgctccggctcgctctgcatgatcttgaccgccgccaacaccgccgccgcattggccgggctcatgctcgcgctgaaaatcaccgttttggaatgatgcttcagataatcaatcgtggctgcatccgacgcaatgaaccccccaagactcgccagcgacttgctaaacgtgcccatgatgaactgcacttgatcggtcaacccaaaatggctcgccgtccctgcgccattcactcccaatacgccgatcccgtgcgcatcatccaccatcaccgccgcccggtactcccgcgccaaacggcagacctccggcaaattgatgatgtccccctccatgctgaaaacaccatccaccacaatcatcttgcccgcatccaaaggcagcttttgcaaccgcgcctccagcgcacccatgtcattatgcgcaaaacgcgaataatcccccagcgccaatcggcacccctccacaagactggcgtgattgctcttgtccgccaaaatatattcatccttgcccgccatcacgctgatgacccccagattcacttgaaatcccgtgctgtacaaaagcacagccggcttgttcaccagccgcgccagcgcctcctccaactccaaatgcaaatccagcgtgccattcaaaaaccgggaccccgcacagccgctcccatacttggccaccgccgccatcgcggcttccttgatcttgggatgattcgtcagccccaaataactgttcgaccccaacatcaaaaccttccggccattcatgatgacctcggtatcctgcgccgaggaaatcgtgcggaaatagggataaagccccatcgcacgcacttgctcggcacttttgaacgcgcgcaccttgtcaaacaacggcaaatccgctgtttccgccgtgcacgccggcggatttttggctccaaggccctgttctatcatgggcgaataggtgtcccgactcatataagtcggccctttgtgtcgcaagttggggttatttattcaatcaaaattattgggagcacaaacacccccctgcctcccgcccccgttggaaaaagggcgcgcaaccggaaatactcatggaaatatcgtggtccccccctcaagcctcgccgttggcacggcggaaaatctcaaggtgatccaccacattgatattgtgctgctgcagagtttgcaccgcccgatccggatcatcaaaacggaacaccagcacgcctttgttctcctttttcaacgtaaaggcatacatgtactccacattgatgccggtcccctccaacaccgcaagcacctcggccagcccgcccggcttgtccggcacctcaatcgccaccacatcggtgaccttcaccacaaagccgttttgctcaagcaacacccgcgccttctcccagtcgcgcaaaatcagccgcaaaatgccgaaattttgcgtatccgcgatggagagcgtcgtgatgttcaacccctcggcggccagcacgcgcatcggcgcgctcagtgccccgggtttgttttccaaaaacagagagagttgtttcagtttcatggctgtggagcggttacattttgcgctggtcaatcacccgtttggccttgccctcgctgcgttgcaacgtgcggggcgtcaccagccgcactcgggcccgaatgcccaccgtgctttcaatcgcgtgcgaaagccgttgctgcagcgcctccaaggcgccaatcgtgtcgctgaaaacctcggctgtcacctccacctgcacctccatctcatccagccccttctcgcgggtcaggatgatttggtaatgaggcaacgtcccttccacactcaacagcgcggcctcaatttgcgagggatacacattgaccccacggatgatgaacatgtcatcactccgccggctgatgcgcttgatgcggcgaagcgtgcgcccgcaggcgcaaggttcactcgtcagcgccgtaatgtcacgcgtccgatagcggatcatcggcatcgcctgcttggccagcgtcgtgagcacaagctcgccctcctgttcatcccccaacacctcgccggtctgcggatcaatgatttccgggtagaaaaagtcctcaaaaatatgcggcccacactggcactgacattccatcgccacacccggccccacaatctccgacaacccgtaaatatcatacgcccggatgccgctctcggcctggatgcgctgccgcatgctctccgtccacggctccgccccaaaaatgcccgcccgcaaaggcagctcccgcaaatcaatccccatctcagacgcctgatcgagaatgtgcaaaaaataactcggcgtgcagcaaatcaccgtcaccccaaaatccttcatcaccataagctgccgctgcgtgttcccgccgctgatgggaatcaccgtagcccctagccgctccgcaccataatgcgcccccagcccgccggtgaacagcccgtaaccatacgcgttttgaatgatgtcccccgcgtgcaccccgcaggccgcaaaactccgcaccatcgcctgcgtccacacctcgatgtccgccgcattatacgccaccacaatcggcttgcccgtcgtcccgctcgaagcatgaagccgcacaatctcatgcatcggactcgcaaacaaaccaaaaggatacgtatcccgcaaatccgtcttgaccatgaaaggcagccgcgcaatgtcctccaacccgcgcaaatcagcgggcttcaccccccgctcatccatgcgctgacggaaaagctgctgatgatcataagcgcgctggacaatcgccttcaaccgctggaattgcaatgcgcgcaattgcgccggcggcaaaaaatccggggcgcttaccggatgaaacggaatatcggtaacggatttgctcatgaggaaggttacaggattgattgtccgcaaaacgcctccccgcccgccttccgcatcgtgcaaaaatcaaccccgcgggccaaccacccgcatggccacacagcaggcttgcgtttcgcgtgaacaccgcccccaccctaccccctccccacccccccggcaactccaaactgcacccttcgatttgcccctgagtcaattcgtaatcacctgatcaatttcgaaagtgaatcatgggtcgggacgtttcctcgatcatcagtctcggtttccaagttccgttggaaattggtttgaccggagcgtgggttcgcccaacatagccgcggcatgaaacctaaagcgtatgcggcggcgggggtggatattgacctgggcaaccgggtaaaggccactctacccaagttgctcgccgccactcatcggcgggaagtcctcggcaaggtgggcggatttggcgggttgtttgcgctggacacccggaagtaccgccagcccgtgctcgtttccagtgtggacggcgtgggcaccaaattgaaaatcgccttcgcgatggacaagcacgacaccatcggacaggacttggtgaatcattgtgtcaacgacatcgccgtgctgggtgctgagccgttgtttttcctcgattatctcggcaccggtgtgctcgagcctcgggtgttcaccgaaatcatcaaaggttttgccgtggcctgcgcgcaaaacggctgcgcattgatcggtggcgagactgcgcaaatgcccggtttctaccagcccggcgaatatgatgtcagcgggacgattgtgggagtggtggagaaaaagtccatgctcgatggccgtggtgtgcggcctggcgatgcgttggtgggactcgcatccagcggtctgcataccaacggctattcgctggcccgcaagattttctttgaacaaatgggcctgcgccctgacagccggttgccggagctggggcagactttgggggaagaactgctgaaggtgcacgtgagttacgggccggtggtgcaggcgttactcaagcgcttcaatgcgccaggggccccgcgccgcatcaaagcgctggcccacatcaccggcggtggttttgtggacaacatcccgcgggtgttgccatcgggatgcgatgcagtcattcgaaaaggtacctgggaagtattgcccattttccggctgttggcggaggtgggcaaggtgccggagcaggagatgtatcaagtattcaacatgggtgtgggaatggtggcgatggtggcggcggaccaggcggattcggtggtgcgcttcatccggcgccgggggcaccaggcttggattgtgggtgaaattgtgaagggccgcggcgtgacgcgagtggtttgacgctggaagtttaatccgccgggcgccagtcgagcacctggagctgcacttgagattgaccgttgtaccgattgatttggggaatcacggcaaggtcaaaaacgcccacaggccaatgtttgtcagcgcctttccaccacacggcttccatggtgaggcgcccatcggtcacccacagtttcaagtgctgttggtgggcgccgatgcgcagcgggacgcgctggttgaccaggcggtggacgcaaagatgcaccggcgggttgttttgcccaaaaggcgccaagcgttccaaggcggccaccgtctcaaccgttaattccgccaaagaggtgcctgcatccagacgcagagggggaatgagctgatcatgtttcaaccaacaacggcccaattcgttcaagcgcgtgcgaaaagcggggaggttttccgggcgcaaggtgacgccggccgccattttgtggccgccgtggcgttccaacaaatcgtgacactgctccaaggcggcggcgaggtcgaagccttcaatgctgcgcccggagccgcgcagccaggggccgtcgcccccaagaataatcgttggccggtaaaagttctggaggacacgcgcagcaacgatgcccaccacgccgatatgaaaatcgggatggccggccacgatgacgaaatccttttcagggttaaacgtggcttccagttgttcaaggagggtggagaggatttgtttttccaattcctgccgctcgcggttgcggcggtcgaggctggcggccaggggttcggcttcttccaaggtttcggccagtaacaagcgcaaggcttcctcggcggattcaaggcgcccggcggcattgacacgcgggcccagttgaaagccgatgtcgcgcacgcccaccggttcgcggacctgggccacagccttgagggcttgcaagcctgcgcggcgggtggtgttgatgtgtttgagccctgcgctcaccaagatgcggttttcgccctgaaggggtaccagatcggccaccgtacccagagcgacaaggtccaacaggggccgcaaatcagtttccatgaactcgggctgattcaggcggcgtccttctcgggtcaaggcgtgaacaagtttgaaggcaagtcccaccgagcaaagctcggtgaagggggcgtccacggcggagggatgggttgaaaaaggattgaccagggcggtggccggcgggagggctgccgcacattgatgatggtccagcacaatgacctccactccttcgctttggaggcgagagatggtttccaccgccgttgaaccgcagtccacggccagcagcaggtgggccggatgctgggcaagacaattgcgcgccgcatcctccgtcaggccgtaaccttcttccatgcggtgaggcagatatgtgcgcaccacccagccgtggcggctgagaaaaagttgcaacaaagccgtggcggaaacaccatccacatcgtaatccccgaagatgaccaccatttccccgcgttcacgggcggcccacaaccggctcacggcctcggccatgccgggaataagcaaggggtcctgaagctcgcgcaggcgcgggttgagaaaacggctggcctgcgcaggttccgagtggccgcggttgacaaggcactgcgcgaccaatggcggcagcgaaagctcgcgcaccaggcgttgcaccaacaacggttcggccggggcggtggaccaccggtatttcatgaggcacggccgaaaccggcagaaaagtttccatcaatcatgaagcagggatatagcaaacgaggctcaaaagtaaatggcgcgatgccgcggccaaatgttttcgggggggttgcacgaggccgctggagttgggccgccagcaaaattttcttccaagacttcaacgcgctccggtcccctgcaacacagcagggatggtgcggaagaggattttcaaatcgagccacaaagaccaatggtcaatgtattcaaggtccagacggacccattccttgaaatcgctgacgttgttgcggccgctgatttgccataggcacgtcaggcccggtttcacgctcaaacgccgccgatgagacaggtcatcaaatcgcgccacttccatgaccggcagggggcggggacccaccaggctcatctcgccccgcaacacattgatgagctggggcaattcatccagactgtatttacgcaagaagcggccgatgggcgtgacgcgagggtcctgggaaattttgaagacgggcccctgcatttcgttgagggactccaactcgtggcggagctgctcggcgttggtgaccatggtgcggaatttcaacatgacaaaaggcttgccatgcagcccgcagcgttcctgacgaaagaggatcggccccggactggtcaaccgaatcagcaacgcaatcagcagcatgacgggcgccagaataaaaagtcccaccagcgctccagtgtaatccatgatttgcttggccaaagattgccaactggcttcgggggcgctgcggaacaccacaaccggcaggtccatgaattcgtccagcgaagtccggtaggtctgtgttttgaagaagcccaccaccatccacgcctccacgccctccagctcgcaggcttggaggatttgctcggcttcccggaagttgctgtggccgcagtgcaccaaaacagcgtgggcggaatgttgatgcaaaaggcccgtgagaacttcgggtttattccgttccaaattcaattcggccaccaccgtggcggagccgggccctaaagatttgagcttggagcgcaggatttggaggtccccttcgttgccgcccaccacgataacgcgtttctccaattggtcgcggccatggctggtatggtagaggccgctgagaagcaattccttgcccatcaacaagagaaaactaataccaccatagagcacgagcacgccacgggccagttgctcgcggaacagaaacatggcgagaatggcggccagtgtagtaacaacgctggctttgagaatcatgagcgccgtgcgccgccgcgagaagaataggggtcgttggtaaaagccaaaccaactcaaggcaatccatgccgtgggggcaatgaccaaccaaagccacatgaaatcatcgaagggggcaatggggtcgcgtcccagaagatgctggtttttggagcgcagctcatgggccacccacaacgccagcaaatgcaggccggtgtccatcacttgatggacccgcgtgcgaagagcgctggaacgtcgcagcatgatattctttacaacctgatcgagccgagtcgtcgagccgggttgtccggcatccatttaagccccgatcggggcatcggcgtcaagtccccccatgccgtcaaggcagggctcgggcttgcgccttgaccggcggggccggtggcaactgaaactgaggcacggcttcttgaatccattgcaccatccacttcacggtggcctcttcctcacccggtgcgcaggtggtgaaaagggaaatgtaggcccagcgttgcagctcgccggtgcgcaacatgtgcagtgtttgagaccagacgcggcgcgtgtgcagcgccgaaatttcgccatcggctacaaaccagtaaagatacattccgcgcaaggtgacttcccctttgggggtctgcatggtcttagtggactggactttcatcaccggcaaggagtattcgatgggccgctgcatcggcacttgaatgatctcggtgtcgctggccttgtattcccaaccctggccgttgagacaaaactccggcttgtgaatgctggtgcggtcgccacccatgaggaccacactcaccaaaagtttccgttcatcaggccattcgtacaaacggcggccgtaggtggtgtcggagggcagccagatgagttcgagtttgctcaccggcaccgaagtggaggtggctcccatcacttcaggcggcaggtacacactttgtggcatgaccagccggccatcttcaccccaagtgggttcattaacgagtttgacccccggggcgccaagatgctgccgggttttggcctggttcaatgccatccccgtccctaccatcaacaatagggccgccacaaaaacctgcactgcgcgctttgtcatacgacttcaggaacacccgccggcggggggacgcggcgaggggtaaacagtttgccggtcaggtacaccattgcaaatcctaccacgtaaggtaggaaactcaacacggtgctgttatggacgtaattaccgccttcctgcccgaacacctggcctgcggccacaatgagaagcaaacgcaacacattgctgacaatggccgccggcacagccataagcacaatgatgccccgctgccacatcggtttgaaaaacacaaacccgtaaatcatggtcagcacaagcagcgcggtcaggctttgaatgccactacaggccggggcgatttcatattggaatttaccgctgggatcaaaaatctgcgtgccgttttgaatgaccggcacccccagcacgtgatgcgacaacgccacggtaatctgcgtggccactagtcgcagcggaaaggtgatggcctccgactgcgtggccaaaggcacgcaaaacaccagaaggcagaagggaaacacggttttcttcaaccacaaccatccccacaacaggcccgtgatggcgtaaatgcccaaataaaaacctaaaatggaaatgcgcgcctgctgggccaggtaaccgagcaggtgtagtcctgaggcgatggccagcagtcccagagccggccaccaaggcgctttgggcagaggcagtaattcctggcgtttccaccacaagagcatcaacaccagcaggggcatgtagtagccatgttggtcttcgggactccattcgtaggcgtgaatcatccaacccagaaggcttccggtcttgatgtagccgaaggtgctgttgccccaaaagtgaaacaacaaaatccacactgccagcagggcccagaagagttcgcgatggggaaattgggcccatgccgccgtcacgtccgcccagagttggcgggctgcagcaagcaaacttttttgctgttcggtctgttgggtggtggcttccacactcatgcgcttacgtaccgcgcattaatttagacaagcttggcacccaattcactcaaaaatagcgaaaaaaagatggtcttgtcctgaaacaggcaatcaaggtttaaaaagcggatcctccaccgtttgctgccattcttgcagggatttcttcaattgctccatcacatcggcaaaatttgcctcgccggaaagatcgcgtgtttcccatgggtccttgcgcagatcaaagagctgaacacggttggcctggggataaacgaggagtttgtagcgctcgtcgcgcaccatgcgttgatgttcccgataggcagcgtaaagcgtggtataaaccttatcttcgcgtccctgcataatgcccaccagactgcggccctccaccaccggcggcaccggcaggccggaaagctcacacaacgttggaaaaacatcgtgcaaatagcacagcgcagccgagcggcgattggacggcacaccgggcccgctgaaaacaagcggcacacgcacactgtgatcgtaaaggttttgcttgccgagcaacccgtgttgcccgacagccaaaccattgtcaccaccaaagaccaccaacgtctgccgccgaagcccccgagcctccaacgtgttcaaaatgcgcccgatttcggcatccaaatgcgatatcattccgtaataggctgcaatttcctgctgcaccgccttcggggtacgaggccaggggagcaatttttcatcgcggaccttgagctcaccattgtcgaaggggtgctccggtaaaaaattggggggcagtttgattttctcggggcgatacatcgcagcaaactccgggggcggcgttcgcggatcgtgcggcgcagtgaaagccacgtaaagaaagaaaggctgttccactggatgtcgctccaaaaattggatggctgcgttggcaaagagggtggaggaaaaaacacggttggtttggcggcggttgttcggatacgcgccagtgggatcgtagctgtgcaccggcacctgctcatgatcatgcatgccaccaaagaaaattgcgtcgcccgctgtaaaagcccgattgaaggaaggtttatcgttgtgccacttccccactgcaaaagtgcggtaaccggcggagcgaaagacctccggcatgagcactgcgggagtacggatgacatggtctgccgggcgtccctgcgcggcaggcaaagcagcgcggtacaaggtgcggcctgtcatcaacatcgcgcggctgggcatgcaaatcgccccctggcggccgcccatgatgtgggcgtgagtgaaggcaaacccttctttcacaaggcggtccaggtgaggcgtgcgaatggcggaattgcccagcgcgtggatggtatcgaaacgctggtcatcggccagcaggatgagcacattgggcggcggcgctgctgcggcaaccaccactattgttaaaaagcagatggccgccggaaggttgcgtaatcgtcggatcatgcctttttctatcaggctaccgccttgggggcaaaggcgaaaaccaagccaccaaatcaaggagatccgcgatttcaaggggtggctggcacattccagcgctcgcggtcggtgaggaagagttgctcaggaaagaggtcagcgtaggcatgtttgaggggaaagccttcaggaacctcccgccgcaaaaggcattgggcaatgaacatgccccagccctggttttcgccctgcacccactgggtgagaaagcggttgtccaaggtctgcggcgtcaaataaagcgccttgattggatgctgccggtggatcgcttggaaatcaccctcggaattaaggggcagccacacgcatgtgcggttgccgtaccatgccacggcccaagggatgtcactcatcatcaattcatccggttgcatccacgcggaaacagcctgaatgacccgcggcgcgtaaggcgggtaggccatcatgggcgagcgcggaggcagcagcttcaccaccaaaggtgccatggccaccaacaaaaacccgcccacgaacaatggccgcgcctcccataccgcggcgcgcgcctgatccaaaagcgtgaagaaaagtgccacaccgaacatgaccaccaacggtgtcatccaaaccaaaacgttttcggaggagacctcgcgcaacgtctggcgcggactgcccgacaacgcctgaacacccgtcaacaacagcaatgacagtagtacaaacaacctcaatcgcgacaacaccggtctgcggaaaggcaccagcaagccgacaagaaaaaaggcgctcacccatgtgccgccgaggcgcggcaaatcttccggcaccacctggcgcaggccctgcaccagtttcagcggcaaatccaacgcctccacgtgcgtaaaatcaggctccaaagaccgcggcaacgtgcttgcaggaaaactcggggtgccctcgtacaacacatagccggccgtgccgaagaaggttccgctcaattcataattccgccacaaccagggggccaccaccgcaagagacaccagcgaggtcataatcagcgccaaccagcggcgcacgccaagatgcgccagcacaaacaccaccaccggcaaggcaagccacgcgaaggcatagcgggtcaacacgcccagcccgagcaccaatccggtcaacgcgcccagccctgccatgcgccatccgctgcaaaactcctcggctccacgctccaaccacaccaaacaccagatcaaagccagcgcccacaccatgaccaataaggtggagccgccgctcatgctcacgcgccacaacaattccgtgcccatcaacaccaccgcggtcagccaggccaccccctcatcgaacaaccggcgggccagtgcgtaggccatccaaaccaccacgaaaaacaacacttgattgagaagcacgatggccagctcgggcaagggccgcgacggctttgcatccgccgcaattttgtcctccaaaggaaaaagtttcatcaagcccgacagcaacaccgggtaggccggaggataatgcaagtcgggcatgggctttcccagttgggcgggagccagcaggcggtcaaaggcctggcgttgttcgggagtccagcggctttcgtccggcggcaacttgcgacgcgcatcctcggccttgcgcacggcctgtttttgaagcagatgcacggccagcggatgaatgcttcgggtgacatacccttcgccgcgggccaggttgcgtgccaattgagcctgctccatggtctcgggcagttcaaagttgcgccaagcccgcacgtcataaatggcggccagccctgccacactgagcaataacaaggcaaacttcagcgaccggttgccggcgccttccgtccaatgataaatccattcctggatacccgacataaatgatacgctctttcggggcccgcgcctccacttgcgcaagctgtgcaagccaacatggagacagccccgccctcacgcaagttatttttgaaaaacttgaatttataaacgttctttgaaccagcgtcgcgttttttcccacatggccggcgtgtacacgtggccgaggccggagatgatttcattttcgaaatcggcctccgcatcataaaggcggtagatgggacgaacggcggcgtctatggcgcggatgccggagaccggagagccggcgtcctggtcgcccgtcatgaacaacatgggccgcggtgccgccaaggccacaacagcctcggtatcaaagtgccgcagcagcccgggcacataataataaatcccgtggtatttcagcccctcggcggcgatcaaatcttgataacgtgtgaggcaggccaccgccacaccggtcttggggcggtcatccaaagccatgatccaccaagtgcgcgtggcgcccatgctgatgcccgttacgccgatgcgtgccgggtccaccgccggatgggcggacaaatagtccaaagccatcaaatcatcccgcaccatcatcccccacaacgagcggccgtaccaaagttgaaacttgctggcgctcaattcaccagcgccgccccgctcggaggggcccccgggcccccggccattgcgctcgccgaaacaataagcatcaatggccaacaccacaaaaccatcgcgcaccaacgcggggccgggaggctccggcagggcgttggtgcggaacagttcttccttgcccacgtcgtaatgacctccatgccaatgacaatataaaatggccggtttgcgcgcagggccgtccttgggaatgaggaggtaaccggggacagtatcgccagcgccgttgtcaaaggtaaatcgctccaaggtgtagtaggtgcggtcttcacgcgagatggtttgaaccaccggcaccttgggacgaggcggcagatcccccaaggtggtccgaagggtggtgcggatttggcgtcgctgtttttcccacgccttgatgttggctggcgccttgaattccggcaccggcggcgccgattgcagccagtgctttccggcggacgactgaggttgtgccataagatgatgatgcaagagtccaaagacggccgacagaacggcccatttcaagtcaaggaatcgcataacaaaaaattacggtttgatcccatcaacgcaatgccaaaaccgaattaactcagaaatcaaaagtcaacggagccgggaggtgtacaagggcgttgccgattcattgaatcatatttgtggttacccaagcacagattttaaggctatctgccaatcgctaagagtcggccccctccctggccgcttccattgcgccttacatcgccaccagacgcacatgctcactttgatgttctcacgatgatgattgttttcattccgcgattaaagcttggcccgggcgatggcttttgctaacgtcccgcccatgccagagattgccaattacgtgagccacggggcgcgattgatcacgccggccatcatggagcgcgtgctgcgccaactccccatatggaaggttgagttcacccaaatcaacgcccccaagtatccccatctggtcacccagcttgaatttctggtggacgcagtggaggacttcgccgaaggcgcagacaaagacctcccctacgtcgccgtcgccgaggccctctttgccctcatgtatgcccataaaaaagtggacatcatccccgacttcatggcagccctcggccacgccgatgattccagcgtcgtccgcgccgccttgattcaaaacgaaaaggcatttgccgcctacgcccaacgccaaaagcgcgactggaaacgcatctccagcaagccttgagattcagcgcccctccccgctgcgggccggatcgcgtgccgccaaaaacgccaccaaatccgccgccatcttttcactaaaaccaggcacctcggcaatctcctccacacgggcgcgccgcaatcgctgcaccgacccaaactttttcagcagcgccgtcttccgctgctctccaatccccggaaactcatccaaaatgctctctgaaatcttgcgcaatcgcaactgggcgttgtatgcgttggccacccggtgcgattcatcccgcacccgttgcaacaacttgagcgccccccggtcatgcggcagccgcagcggctccgactccccgggccggtaaatctcctcaaattccttggccagccccaccaccggcacatccccaagccccagcgcctgcagctccttgaccgccgcgttcaactgccctttgcccccatcaatcaaaatcaactccggcatactcccacgcccgccctcccgcaaaacacgcgtgtaccgccgcctcaccgcctccgccatgcacgcaaaatcgtcctggccggtcacccccttgatttgataacgccggtaacccggcctgtcgggccgcccctccacaaaccgcaccaacgacgccactgccagcgtcccgctgatgttggatatgtcgaacccctcaatcacccgcggcggcctttccaatcccagggccgccgccaagtccgccaaatccgcctccggattcagcgccacaggaagattgtgcggcgtccgcgtaaatgtccgcgtcttgcgcgtggtttcctgtagagaggccagcaaatcccgcaactcggccgcccgttcaaactccagcttttgcgccgcctgccgcatctcctcctcaagccgccccgcaagctcctcacattgccccgccaaaaaatcacacgctgccaacacttgtgcgcggtactgttccaatgtcacgttcccaatacaaggcgcagtgcaaaacttcaaatgcccataaagacaatgcttgtaatccgcaggcccgggattcaacggccggcacccgcgcaaattaaactgtcgccgcaccagcgtcagcgtcgtccgcaacgcccgcccgctcggaaacggcccaaaataccgggccccatcgtccgttcgcagccgggtcaaagtgaaccgcggaatgggatcctgcagattcaccttcaccatcggaaaccgcttgtcatcccgaaaactgatgttgtaacgcggcctcaattccttgatgagccgcccctccaacaacaacgcctcaggctcgctccgcaccacgtgcacatccaaatccgccaccgcctccaccaacgcattcaacttcaaatcccacgccatccgccgcgacggttgaaaataggagctcacccgcttccgcaaatcccgcgccttgcccacataaatcaccgtccccaggcggtccttcatcaagtacacacccggtttgtgcggcaactgggcgagcttctgtctaagcgcttccgacaccggcatgcctccattatgcgccccattcccctccccgacaaccgcgattccacgcctattggccaagtttattcagaatttggctttacccttaaagcgattgacaaagcccctggagatgggaaatatgctcatcagttgcggttaatctcgcactgacgtgaattagatttgtccaacaacacaaggcgggattggctgtttttttgctttggcatttgacagaaaaataagagctattgtttgaactaatatcggtatgaaaattgtctctccacaggaagcggtcaaagtcattaaatccggcgactgcgtacacatccacgccatcgcctgcgtcccccacaaagtcgtccaggccatggtggaccgcggtcgcgccggtgaaatcaaaaacgtcaccatccgccacctccacaccgaaggccccgcccattatgtggagcgcgacctcgaaggcgttttccagctcaattcctacttcgtgggccacaacgtgcgcaaggccacccaggaaggctacgccgattacattcccgtttttctcggtgaaacccagcgtctcatccgtgaaggctacaccccggtcaacgtcgctctcatctctgtttccccgcccgacaaacatggttttgtctccctcggcacctcagtggaagccaccctcgccgccgtcgaatgtgccgacaccgtcatcgccaccatcaaccccaacatcccccgggcctttggcgatgccatgattaagaccgacatgattgacatctggtgcgaggacgatgcccccctcgtcgaggccaatttcgccgcacccaatgaagtcgaacaggccatcggcaaacacgtcgccgccctcgtcgaagacggcgccaccctccaaatgggaatcggcgccatccccaacgccgtcctggcccagctcggcaatcacaaaaacctcggcatccacaccgaaatgtttgccgacggcgtcctgccgctcgttgaaaaaggagtcatcaacggcaaggaaaaagccattgaccgcggacgcatcgtcgcaaccttcctcatgggctccaagaaagtgtacgacttcatccacgacaaccccgaagtcatgatgatggacgtcggctacaccaacagcctcgatgtcatcaaacgcaaccccaaggtcaccagcatcaactccgccatcgaagtggacatcacaggccaggtctgcgccgactccatcggcaccaaacacttcagcggtgtgggcggtcaaattgacttcctccgtggcgcctccctttccaagggcggcaaacccatcctcgccatgccctcgcagaccgacaagggcatcagcaaactcgtccccaccctcaaggttggcgccggcgtcgtcaccacccgcgccagcatccactggcttgtcaccgaatacggcgcagtcaatctttacggaaaatcactccaggaacgcgcccgcctcatcaccagcatcgctcaccccaaccaccgcgaaatgctcgacaaggccgcctttgaacgctggggtccccatttccactacatcccggccccctggaaaaaatagaaatcctcaatcattcaccccgcgcccggcccccaaagccgggcgtttttttatgcccacacttgcccccccgaggctggcctcaactttttaaaattccatttgatgaaatccgcccccgcattcgtctaatcccgtggacctatgaacaaccaaatcaatcgtcgtcgtttcctcaaagccggtctctttaccacggctgccctcaacattgtccccggcggagtcctcggccttaacggccaaacccccgccaacaaccgcctcaacatcgccggcatcggtgtcggtggccaaggccacagtgacctccgccaaatgaaaagcgaaaacattgtcgccctctgcgatgtggactggcggcatgccgctggcacttttaaagaatggcccgacgccaaaaaatacaaagattaccgcaagatgctcgacgaaatggaaaagagcattgacgccgtagtcgtcgccaccccggaccacgtccacgcctttgcaagcatcgccgccatgcagcgcggcaaacacgtctattgcgaaaaaccgctcacccattcggtgtgggaagcccgcatggtcgcccaggtggccaaagagaaaaaagttgccacccaaatgggcaaccaaggccaggcctccgaagaaactcggcgcttgtgcgaattcgtttgggacggcgccatcggcaacgtcctcgaagcccacatctggaccgaccgcccctcgcaaggattgtttaatgaatactggccccaaggcgtcgcacgccccaaagaaaccccacccgttcccccggatttggattgggatttgtgggtcggccccgcccccatgcgcccctaccatcccgcctatttgccgttcaaatggcgcggctggtgggacttcggcaccggcgcgctgggcgacatcggctgccacgccattgaccccatcttccgcgcttgcaaattgaccgcccccaccagcgtccaagcttcctccacccgagtcaacaccgagacctaccccctcggctccatggtcacctaccaattccccgcccgcggcaacatgccacccatgaaactggtctggtacgacggcggtttgcgcccgccgcgcccggacggcttgcccgacggcgtaaccatgggcgacaacggccgcctgctcgtcggcgacaagggtttcatcctcggcaaccgccttttccccgaagctcgacgcaaagaatacaccgaccctccgcgcaccatcgagcgctcgcccggccattaccaagaatggattttggcctgcaaaggcggcaaaacaccaggcagcaacttcgcctttgccggccccctggcagaagccgtgttattgggcaacgtcgccctccgcgtccaactccgcgaggaactcacccgcaccaagctgctttgggaccccgtcgccttcaagttccccaactgccccgaggccgacgcctttctcaaacgcgactatcgcgagggctggaaattaatctaaagccggagcctgttcacaccgccttcaaggcggcttgcaaatagcccagcgcatacgccatgccggcgtgccagggcgcagcacaactcatttgcggggcgtgatcgggaatgatcacccccgcaaaaccgtttcgcttcaaaatccgcaaaacctccaacacatccacatccccctcgtctataaaggtttccttgtacgtcggcaccttgccccgcacattgcgaagatgcacatacgcaatccgcccctgccggctgtacgcatccaccgcctcatacacatccccctcggtcatttccgcaagcgtccccacgcaaaactccagttgattccgcgggctcggcaccaaatcaatcaaccgctggtataaatgcggttgatacaccaaccgcggctgcccgcgcaccgtcggcatcggtggatcatccggatgtgccgccaacgtcacccccgcctcctccgccaccggcaacaccgcctcaagaaattcacgacaccgccgccaaagctcctccggagtggccgggggtacgttacccggcggcgcgttcggatcgtaaatcatgttccaaaccatccctctcggcatgggcttgtccatcggcccattcattcctaccgcctccgcccctccacgggcaaacggccccttcacccgcccggccacccccgcgatggaaaagttgtaacccataattggaatgccggcggcaccaagattgcggatgataatcttcaagttttcaagctgctctgccttgcgcggcccatccaacaaaacgtcgtgccagtgcgccgggtcaaaattttcaatggcctccagctccaaccccgctgcgttgacccgccgtctcagatctgtcagctcctccaccgtccacaggtgatgcgggtccccagccagcccccaaccggtgtcatcgcccaccggctggtcgccgggacgattgctgcgcgaagaccggaaataatccaccaaatgcgccacgatatgcgtgcagccgcattggcgcgcaaaacgaaaatgctcgtcatccaactgatgccggtaaagccccagtccaagtttcatgcgaagtcagaattaaaaaccaatgctcgcccccccatccaccggcagaataattccagtgacaaattgcgccgcaggcgaacacaaatacaccgccgccatgcccacatcttcaggcttgcccagccgccccatcggagtacggctcaatattttttgacgacgcgccggatcattcgccagcgccttctcagacatgtccgtctcgatccacccgggcgcaatggcattcactcgaataccgtgcggagacaattcagttgccaacgcccgcaccatccccacatacgcactcttggctgcactgtaggccaccacatacggaatcccaaacagcgatgccatcgaagcaataaataacaaactcccccgcccccgctccaccattcccggcaccaccgcccggctcagcgcatgcgctcccaaaacatgcgtcgtcaagacctgcaaaaactcctcctcagtcgtttccacagccggttttttcaaatgaatgccggcattgttgataagaatggtgatggagccatgcttcttttgcacccgctccacaaacgccggagcctcccccaattcatccacatcatgcactgcatagtccgccagcggcccaatcgtccgcacagccgcctccagtgcagcctgccggcgccccactaaaaccacacgcgccccggcagccgccaaacaccgtcccatcgccaaccccaaaccgctccctccccccgtgatgaccgccagctcattttgcagccggaaaggacaaggccacccttccaaatcacactcggacaccttcgtttgatgaatgttcagttgttcgttcatgatttcagcgccgcccgcctatggcgaacagcatcgggccggtaaatgtgggcacgttggcttcatttggcaaatccgaacctccccaccgcccccatccttcaaacctcatccccgcggccaaagtcgaaaccaaaacttcatcggcgcccgcaacaacaaatcccgcaaaagatcctcaaaccccgccgccttcggttccaccagccggcgcgtgctcaacaaagccgccaacgtcaccaacgccgccgccgcaaaaaagatgctataccgattccattccaccccggttgtttgatgccggaaatcaccgatggcatcaatcatcatgccccacaatatcggagccactccttgcgtgacgttccacgccacagaaaaaatcgcaaaaaaatggttgcgccccatcaccggcaccgacgccatcgccagccgcgtaaaagccatgttggccgaagccgcaaacaatcccatcgcgcccaacagccccatcaacaaaaccggcgacaccgccacgacgttggccgccatcaaccaccagccgcccaaaatcaaaacaaataccccaaacgccaacgccatcaccggcctgctccccagggcatccaaccggctgccaaacaaccaaagacttcccatccccccaaggtacaaggccgatgatagcaacaaaattcgcccctcggtcagcgctgcttccgtcttcaaataagccaccggaaacgcctgcatcccaccatacaccaccgcccacaacatcaccgtcaccaacaaccgctgaaacggtggatgccccaaaatggccccccacggcacttcccctgtccccccggccggttcttgcggcaccggcacatccggcatgcgcttgagaaaagtcagactggccgcccccgccaccgcgctgaaaacaaaaagcaaactgaaatggacaggttgaggattactccccaaaaacaaggcagccaccaaaaacaccacaatgctccccaagttgaccaccgccgcatcccgcgccaggtaacgcccccgaatctcttccgggacaaggctggtgatccacggcagccacgcacaactggaaatgccccgcgaaagattaaatccaaaaagcaaaaacaacagcagcgcaagctgcgtgcccttgtccaaaaatgcacccagcagcggcaccgcggccatcccaaaaataaacgccactcgaattccccatcctgcatacacaaaccgccggaaaccaagccggggaatgtattgcgcagccggtatttgaaaaataacgagcagcggcatcatgctgaccacaacccccaacaccgtggcgctggcccccaaactccgcgcatacaacaccatcgggctgctcagcacgatttgaaaggacagcgcgttgaacaacgcaaaccagtaagcgttacgaaaacccggaggcagtcgcggcgtttctgtcgttgttgatgttgaaacaggcatggaatttttggacaaagacgggcgcccacccatcaatatccccgcaaagccgtgcttgaccgcgcaggcaatccgggcgctggcgtccggcgaagcaccacatactcaatcccgttggcctcgcaaaacgcccgcttctccggtttgtcaccatcttcattgacggcgtaaatgtccgggcgcaaccgccgtatctcgggctcggcatccaaccacccccatcccgaagtaaccaacgcctgcgtaacgtgccgaatgctggccaccatataccgccgctcattctccgtctgcattggatggccttcccctttcaaatgccgcacattcgcgtcattccccaccgccacatacaaatccccaagcgcagacacctcctcaaaaaaccgcacatggccggagtgaagccaatcgtaacaacccgttacaataacctttttacgccccggctgaatcacccccattggcacctcgggaaaaccagccaacgcctcctcaggcaaaacatccgcccgccagccgtgctgctcacataactgccgccgctcacgcgaatcttcttccaccgggtaaacccaagccgccgcagccttgggtgccgcctcgggcacccccacattagcccccacaacttccacggcgctgacaaaccgaatggcttccacaaaataccggcgctcagccagaggaaatttgggcggacgccccgtcgcacgcaccaccgacgcgtcatcccacaacaacacatgcacccgcccccggcgcgccgcttcctgcaacaaccgcacatgccgggagcgcaagtcatcaaaagtccctgccaccaccactggaagttgctcattcatgcgttaaatccggatgcatggatgaaatgcgccgggtaccggttcctccgacaccacatacaaataaccaccaccacaccccgaatacatggccccggcataacgcgcttggtaatacttcaaaatggccttcaaatccaccgtcaggaacggatgccgcaccgtgttcggcagcagatattcccaacaatccatgcactcgttgagcgagcgccccaaggcccccgcatcccgtgcaagaatggccgcataacaatccttgcccgtttgcccaagccgccgcacccattccggctccaaacgctgctcgcccaacggatgataaccggggggccgcggcgcgatgggaagaatatgcaggacatgagccaaccactgcgcaatctccgaatcccggcaactttcaatgtgtttgggaaacagccccccttcatgcccggcatcataatccaaacgattgatcccgggataaagcagtccaatcatgtcctgcgaaccggaaggatcacttttgccttcgttttcggcgttgtaaagttcacgcaccaaaacggcaggctccccctccggcaggctatccccccacaattttcgcgccacagcacgtgtgcccgtggccaaaccagcccggtccatccaaggcggcaccggctccagattcaccaccaccatggagccgggcggcgatggattccaccgcgacacaaagggctggtcaatccaacccccggccaaggccagccgatagggcaggtttccccaaggtggtgttggtgtggccccaccggcaggcccggcggcatggcaaaagttggattgggagctgcccatccgttaatacaaatcccgtacggtgtcctcaccggcctggcgtttccggtattgatcctcaatccacttgtaagtggttttcaacccctcgcgcagcggtatggaaggctcccatcccagcatttgtttgatgaaagtattatcgctgttgcgccccgccacgccgcgcggagcattgagatcgtaatgacgcttaagtttcacaccaccgatttcctccaccaacgaaacaaggtcattgatggaaatcatctcgctggttcccaagttgaccggagtggccttcagcgcatcggtgtgcatgatcatgtcaatccccaggacacaatcatcaatgtacatgaagctgcgtgtctggttgccgtcgccccaaatttcaatctccagctttcccgtggccttggcctcgatgaccttgcgacaaatggccgccggcgccttttcacgtccaccatcccacgtgccccatggcccgtacacattgtggaaacgcgcaatgaacgtcgccagcccccgctcggcggtgtactcctggcaaaacatctccgacatgagtttttcccacccgtacccccgctccgccatggccggataagcatccgactctttcagcgcacggcagttgggatccttctgcaattcggtgttgtacgcgcaggcggagctcgaaaaaaaataccgccgcactcccgcccgccaggcatgttcaatcaaatgcgtgttaatcaaaatgctgcgcagacattccacgcgaaaccgctcaataaaacccattccacccatgtccgcagcgagattgtacacttccgcagccccttccacggcgcggcggcaattttcctcaaccttgaggtccaagctcaattcctccaccccgggaacccgctggtaccaatgcggcagcggcttccgatccaccgcccgaatccgctgataacccaagtctttgaagtatcgcaccagcgcgcccccaataaacccaccggcacccgtgacaacaatcaattcatccttggcggcacggttttccatccacggacgttcagttttcgcacaaggggctgagctggcatcagttttggtttgtgtttgcatagcctgtatccattcaaaagccgcgccaaactatcattgctcctccccgcttggcaatgaaggagatttcctcctttcgttcacaccgccgccctgctatccctctgatggcatggttgcgcgcgtgacacttgaaatcgccctgcgcaaagagttcgactacctcatccccgccgacttggaaccattggtcgaaatcggcacgcgggtgaaggtcccctttggcggacgcgaagtctcaggctgcgtcacagcgttgctcgatcaatcctcccacccacgcctcaaacctatcatcaaaatcctcggctcccccagcctggtcacccccaaagtgctggcgttggcccgatggattgccgagtactattgctgcgcaccggaagtcgccttgcgctccgttttgcccgaggccgttcgccgtgaaaaagcgggatggcgcgagcgcctctgggtccgtgtcatcccccgcttgggcgaaatgcccaaattaactgcgcgccaggaggaagtctggcgcgtcgtggaagaaatgcgcgccctgccaatgcaaaaattggcagccttgaccggcgccacacctcaaaccatccgccgtcttgaagacaaaggtttgattaccatttcacccgaagtggacgaacgcgacccctatgccaccgaactgattctgcccacccaacccctccccttgaacgccgagcaggcgcgggccttggaagccatcacccgctccatgggccagcccggccaaccgcccccggacaaacccacagtctttctgttgcacggcgttacgggcagcggcaaaaccgaagtttatttacaagccatcgcttacgccctcagccagggccgcggtgccatcgttctggtgccggaaatctcgctgacgccgcaaaccgtcgagcgtttcaaggcccgcttcagcagcggcccacatcaaactctcgtggccgtcctccacagccacctctccgcgggtgagcggcatgacgaatggcataagatccgccagggccgcgcccgcatcgtcatcggcgcgcgctcggccatctttgctcccgtcgagcctctcggcctcatcatcgtagatgaagagcacgaacactcctacaaacaggaggaagcccctcgttaccacgcccgcgatgtggccgtcgtgcgcggaagccgcgaaaacgccgtcgtcgtactcggctccgccacgccatccctggaaagtttctacaatgcacgccgcggcaaatacgtcctcctggagctgccccaccgcgccgacaacaaaaaaatgccggtggtccgcgtcgtggacatgcgggccgagctccgccgcgaacgcggacagctccaggtcttttcacaatcgttgcgcgatgccatcctgcggcgcctcgaacgccacgagcaaatcatcctcttcctcaaccgccgcggttacgccaccgccctggagtgcccccaatgtggctacgtcgcccaatgtccccattgcagcgtggccctcacctcccaccgcccacaagcccacctccgctgtcacatctgcggttacaacgccgaagctcccacggcctgccccaacgcacaatgccgcaaccccgccattcgcttcgcaggcctgggaacccaaaaagtggagcacgtcctcgctcgcctcttccccaccgcccgcatttgccgcatggactccgacgtcctccaaagaaaagaggactaccggcgaatcctcggaaacttcaaggccggcaaaattgacatcctggtcggcacccaaatgattgccaagggcctgcacttcgaaaacgtaactttggttggcgtcgttcatgccgacatgggattgcacctgcccgacttccgcgccggtgaacgcacttttcaattattgactcaggtggcaggccgcgccggacgcggcgaagtcgaaggcgaagttttcgttcaatccttcaccccctttcatcccgccattcaatatgcgcgccgccatgattttgcgggtttcttcgagcaggagctcgagttccgccaacaactgcgctaccccccctttacacgcatggcccggttgctttggcgcggacgcaacgaagaaaaagtggccttttttgcagagcaatgccgcaaaaagctcgaagcgttgactcaagagctccccgacttgatggtggccggcccagccgccgcacccctggcgcgagcggagactttttaccgttaccatctgacgcttcgcacccgccaaatgaccaagctcagctccgccctggcaacgttgttgccaaccatgcccttgcccgaagacgtaagccttgtcgtggacgtggaccccgtcacgttgctttgactcaccttctttaactcacagctcacctcttgggcaaccggtcgaaagcctccagcgccacctcccgcgcaatggcatggttgacaatcggatgaggataagtccgccccaattccacaccggcctgcttcagaacatcagcaggcgcctcccatggccggtgaatccatgtctccggcagaccggcgagctccggcacccaccggcgaacatacgcgccacccgcatcaaatttttccccttgggacacaggattgaacacacggaaatagggcgccgcatccgcgccgcaacccgccacccattgccatcccagcgtgttgctcgccaaatcggcatccaccagcgtgtcccaaaaccatcgtgctccgtgccgccaatccaccaaaagatccttcaccaaaaacgatcccacaatcatccgcacacgattatgcatccatcccgtagcccacaattcccgcaaacccgcatccacaatcggataacccgtccgccccttctgccacgcccgcaaaacctccccaacatcctcccgccacggaaattttttgaagttgggccgcaacggctcctccggtgtatggggaaaatgccacagcaaatgatacgcaaactctcgccaccccagttccgtcataaacggcgaatgaagccacgccgcatccgcgggacgctgcgcctccgcccaccgacgcaaccgctgcccgatttggcgcgggctgatttccccaaaatgcaaatgcggcgaaagccgcgaagtccccacctctgccggcaaatttcgtccctcggcatatcgcacaaatgccgactgcaaaaaccgctccaactgccgctccgccccctccggcccgggctgccacgtagcgcgcaatccaccggcccaatccaccttgggctccaattccaactcttccaacgcaaccgatttcggccaccccttgggcgcaggcaattgctctggcgccggcagcggctcggaaaaaagtgtcgcttgcgtcaaacaatgtttccagaaaggcgtgaacacttgaaaaggttgcccgctccggtttttcaccgtccacggctccaacaacaaagcagcattccagctctccacctccaccccttgagcacgcaacgtttccttgatgcccttgtcccgcttgatgatcgcaggctcataacgccgattccaataaaccgcatcagcgcccgtttccttgatcaacgcttgcaaggtggccaagctcccccctctccgtatcacaagcccactgccccggcggcgcagtccatcctccaaagctcgcaacgatggatgcagccaccatttcgacgcaccccccggcggccaatctccctcttcctcaggcgcccaaataaaaactggaatgaccggctgcccccgtcgggccgccgcgtgcaaagccggctgatcttcccaacgcaaatccagccgaaaccaaaccaaggtggcactcatgatttcccctaaacaccaagccaatggataattaacaaacgccggttggatacccgcccatttcaaaaacagttcccacgaaataatactagtgcctcaacgtcgcttttccaaaccacgcccccgttgtatgagcagctcgcggctgtcgggcggcacgtcatatttctgtgtctctccccacggccaccgcacttccactgcttgagtgtccgccggcaataacaacaccgcgctgtcctgtgaataccatcccccgcccgcatgaacttcccataccggccccgccgcattttgacgccacgcacgcacctgcgccccaacacctgtcggattcatcggccccgccgataggcgcactcgcaaaccaggccgtgcactgacgttccgataaagccgcgtttccgccccgttctgagtcacggccaaatccacccgcccatccccgtcaaaatcagccaccgctgcgccacgctgttcaccatacactttcacgccggtccgtgtgccctcagccggttccagttttccctcgcccgtgttgcgcaaccacaaaccgcggccggcatccaatcgcgtaacccccgcctgcgtggcaaaaaagttctgactcaaaaaaacatctggccatccgtccccgtccatatctgccgcgcagacactccacaccggcgcccattgagccatcggtggcaacggcgcaacttcccagcgttgggcccgattgaggaaacgatgcgtctcaagcgtcaccgctttgagctcatgcgccgtcttgaatttttccccaagcaaatcagccacagtggccttggcgtacaaggcatgcttgggatacttaggcgcaagaaaaggcagccccactttgttatccgtcaacggcctcctcggcaccacccgcccgggtgtcagctcctcgtaagcctccaacaaatccacctgtcccaaaccattgaaatcgccgtaataaagccgcgcaggaaactttggcgaagcctggtagtggctgttaagcccccaatttccagctacaagatcaagccgcccgtccccatccaaatccaccgccgccaaacccgtccaccatcccgtccatccctccaaccccagctcccgcgtcacttccttgaatgtgccctgttcattgaagaaaacccgcaccggcccccactcacaactcaccgccaaatccggacgcccgtcttgattgaaatccgcaaatatcgccgccgtcaccaaaccaagctttcggaaaaccgccgcatgacgtgcatccgctttgagcaccccttgctcattcaagtacaattgcgaatccaccggctcaggatatcgcccgggggaaacacgcccccccatgaacacatccaaatctccatcgccgtccacatccgccgcagccaacggccccacactttgccctttttccgcaggcaagacggtggaggcccccccttgcacagcaatcagagccttgctgccctgccccggctccaactcccaactggacatccccaccaccagcgcccgctgtgtcggcgcaagctggatgcccaacagcgacgtcgtatcctggttttggattccgcccatgtccggcaacagcgtccacccccctttaccgtcattccggtaaatgctgattttccctccagcgcccgtacccacaatcagatcatcccaaccatccccatcccaatcataccacgtcacccccggcccggattgactcagacggttgggcaaaagcggctgccgcgcaaaatcatcgtaagccacttcatgatgacgatgccccagtttctccgaaacatcctcaaacatcaacgccggcggcgcagcccgtggtggcgccggatttgccacggcgctggattgggcaatttcataaacccgattgggacgcgcatccgcaatcaccgaccgctgtcccccgggccacaccacttccacagtcagacgctcagccgagcccgccgcaaatgtgcggaccgtatcatcacatccgagataacgccccccggccaacatctcctgaaactgcatcggcaccgctccgccacgcaccgttacccttgcattgatgccataggtattgggcgcaagcccgcgcaaacgcaccgccacccgcggcgccggacaattgttccgataaaccagtgccggcgcattcaaacaattcaccaccacatccaaatccccatcgttgtccaaatccgccatcgctatcccatgcgaaatctcttcggcatgaaatccccattgcctccccacttcttcgaaccgcaggttaccaagattccggtaggcgtaattcggacttaaatacggtggtatttccagtagccgcgcccgaaattcctgcaggttgcgctcctgcgaaactgtccccgctgcatcgagcatgtccatgtcattcacattgtgggagtagccggtggtcaccaaaatgtcctcaaacccatccaaatccacatctaaaaacgccggcacccatgtccaatccgacgccgccacctgcgccgcatacgccaattccgcataggtgccatcaccccggttccattgcaaaacattgcgcgttgtcagtatccggttttcaatcgcacccacaggcggatggacaaatttcatgccggtaagctggcgcatcagacggtcatgcgtggtgggtttcatctccgtacagaacaaatccagcaacccatcccggtccaaatccccgaaatccatccccatgctcgcaaaacacatcgtccgcaccgccagccacggcaccgcccgaaacacccctcccccttgattcaaccaaaacctgtccggcgtgtgaaaatcattggccacatagatgtccacccgcccgtcgtcgttcaaatcacgcaactgcaccgtaaatccgtaatccatcaaattggtccggatcggctgcccattctcatcaagaaaccagttcgcccacgattgaaggacaaaacgtcccccgccttcgttgatgtacaaatcatcctgctcgcccacctcaatcaacatgttcccctcgattttcaatcgccgcgcccaacgccccgtgaccacaggacggccattcacataacgcaccgagtaattgcccccgccgcgaagtatggtctcctccccgtaattggccacatacaagtccaagtcgccgtccccatccaaatcccccaaactggcactcgtacccccgcgagtattcgtgaatcccgtatccgtcttctcggtaaaatgtccgcgaccgtcattcagaaaaagccgggcgccccgtccattgaatgtcacaataagatcaaggtccccatccccctccacatccgcaaagacagccccgcggctcaactggttcaccagccccaacccgctgctcgccgtcacatcttcaaatcgccagcctcccaagttgcgatacagggtattggtgccattaaggctgcacaggtaaatgtcacaccacccatccccatccacatcccccaaggccagccccgaaccattgatcaaattggcatttcgggcgtcactttcgggagtaagcaggttgacaaatgcgatgctggtttgttggggcggcatccgggtaaatccggcggagaaatttgtggcaaaagacaaatcgcgatacttgtaaccgttggcgactttccagtccaatgccggagcacccatcaggccatcgctgaccagaaggcaacacgccaacatcgcccattgtccggccttcccggcagaaagccgccgattgcgcaccattttttgcatcattacgggtaagtagcgcccgcaaatatgcccaatcgcaagggaaagacaatgagatttggtctctttccacgcacaaattcactgttttccgcaaaaacgcccccttcaaggggccaccgtcagaccagagggagccctcaagcggtagccatcggaaaacgtcaccgtcaacggcgtggtttgaaaattataaaccgcatacgtcttgcgcccctccttgcggtacacattgaaaaaaggataatccgccgtcactcccgtgtcattgagccccaaacggtcaagggtgtgaatccattgatacataaaggcgcgggtattgccgctttcaattttgttttccgggtgcgcctccaaatacgcagcagcagccgccggctccgccaacgcgcggaacatcaacaccaaatccccccaacccgtgttgtaatcgctcccccctttgcgccgcgccacaatccgatcatggttctttttcacatacgccggagaccgccccatataaacactggccggcgtaaacggcaaccagttgatgccgtgaatgcaatctatgtccccggaaaaccacgtggcaaatgcccctttgccgccccacaccatccccaacgccacctccggaaaatcctttggaaaattcgtgcccgccacgtcaaaccagtattcctccaccgcagtccgctcgatattgaacaaggccaaacccgtatcccgcaaagcacgattgccggtggcctccccccacaacatcactccataccacgcattgagcgactcactcgatgactcctgattgttgccatcggcaaaattcgcatcgcccgatgcccacgagtgccccgcgtatttgtcaaaacaacgcaaataaggaaacatggcatcccgcctgtcggtcgcggcaatgtcacgaatcaacatttccaccatcggcccccaacgccgcgcccaccccgcatccttccgggccacctccgctgccgcgcggatgaaatagccgtaatgaaaatgatgatcattcagtggtaaatcgcttccgtaagatggccggctcccaaccagcgttccccaacgtgcattgtaatagaataccacctgctccttcccgggcatagcgctaaaccattgctccaaacgccgcttgagctcgccaagaaagacctcctgcaattccggcgcccccgcagcctccgccaccccgctcaaagtcgccagcttgccaaggtgcttcccctcccaataagtatccccaaacccggccggtttcttgccggcctcagcccgcaaaagctccaccgccttctcgcggctggccagcccctgcccgggtaaaaacggcagcaatccctgcacgggtatctgcgtggtaaatccagccccctcgcccactttcatcaatccccgtaccgaattgtagctgagctccgtcaacggactgcgcacatatttccactgatgcggatacaaggcaaaaatcgtccccacgtcagccccctcctgcggtttgaacgcataccggtaagtcgcgcgcacattcccgccttcatgcacatactccaaccgcgtatccaccacgtggttgtgggcaaacctggcaaaacgcgccaacgtctccggcttgtcatccggcaaaaccgccaccgtaaaatacgttttgcctccggcaaaattggtccaacttcgcccctccaatcccgcccaagtcgagcctcccggaccaaaaagcccgtaatgatgaccattcaccgtgatccccagcgttgcctcccgccccgtgccgctccacaaccgcggcgtctgcgaaaatgtcaccaccggctgcccatcgctataaacacaatagacatacggactgccatgcccaaagctcgtgcgcaaccgcgccttgttggtctcaaaaacaacgctcacaaaccaatccgaccaccccccgcacaacgcctcgggaaaattcgccgcagccgagtgccccaacattaaatcgccctgccttccgccgccgctgccaaaaatccccgccgaggttgcgctcaccctggccccatgctggcttattgccagtccgttggaggtacaacgcagcaccaacggatgcgcaaaaagattctgcgaatacggctgccacaccaaagaactccaccactgccctgtaatcatcgggcctcgcaaatcctccgtgcgatatatccgctccggcagtgccttgcagggacgcggcgccgaactgaggtaacctccctcacccactttgatgaccgccgacccgtcgggcgtcgccgaaaaacctggagcccctcccaccaaaagcactacccaccccaacaatccaaaacgcatcacacgcagcagactgcccccatggtgaatcataaaacagcggatgttcatggcgcctacctttaagaatttcggcgccatttgtccaaacaaaccaaaaaagccagcggcccacctcccccccgaagacctcaaccgccctgctcagccctcagccaccggccacaatcttgactatctccagcctgtcgccctcctgcaaccgccgctgcccaaactccgagggcgcaagcgcctccccgttcaactccaccaccacactgcgcggatagaacttttgggccaccaaaaactcttccaccgtgcagggaagcacggcctccacagactgtccattggcaataacttgaggcatggcccactcacacccccgccagcgcctccgcaggcgcagcggcaatttcatccatcgtcaaatagcaacccggatcttccgcccacggatccccaaatacctgctcggcacgcacccggaatccgcccccgcaaatctcctgaaaacggcaaatcccgcaccgtcccttgagcaaaggccgccgattccgcaaaccattcagaatcggatgatccgttcgtgtccaaatcttgctaaacggcgtctccttcacattccccaaggttaccgactgccaaaactggtccggatgaacattcccctgcgtgtcaatattcccaatccctacccccgaactgttcgcgccgccgccgttccacttcaacaaatcataaacttccttggcccgcggcgattgctcccgcaagagccgaagataaagaaacgcattatccgccggctggtccaccgtcagcacctcccgcgtctttccgttctgattccattgcatcgtgcggtcaatgatccggtcaatcgccgcccgtgtccgggccggcggcacactcacaaggttggctccccgcccgctgtacaccaaatggtaaaaacaaacccggtcaatgttctcaaattcaatgaaatccaagatgcgctccaaatcatccaccgtgttgcgcgtcagcgtcaatcgcagccccaccttttgccccaccgccttgcaattccgaaacgcctctatcgtcttttcaaacgcccctttcttgccacggaaataatcatgtgtatccccaatgccatcgagcgaaatccccacgtaggaaaaacccagttccttgatttttttcgctgtggacaggtcaatcaacgtcccgttggtcgaaagcgtcaatcgcagtcccttctgcacggccctcgaagctagatcaaaaaagtgcggatgtatcaacggctccccacccgacaacaaaaccgccggcaccttgaactccgccaaatcatcaatcaccgcgttgcattgctccaacgtcaattccccgggatacacctgtgccgtggaatccgaatagcaatgaatgcaattcagattgcaccgccgcgtaatgttccaaaccactatcggccgccgctcagacgcagaacgcggggccccgtggccctggccatatcgaaggtgatcggcgggctgggccacgccacaatacaaacgtgtcagattcagcatggtactaaaatactagacttcaacagtgccctccttacgaggccgcaggcgcaggcgcagccgcaggatggtattgcggtgaaacgtaggcgcacaacggctcctccccaagataatcgccggtcagcgcataagcacgagcgcgcgagccgccgcaaatgtccttgtactcgcacaccccacatttgcccttcaaaagactggaattgcgcagattgcggaacacttcatgattccggtacacctcaatcaattcatccgtacgcgcattcccgcccgtaatcggcaaaaatccgctgggctgaatctccccaatgtgggagacaaaaacaaaccccttcccatcattgatgccaatcggagcgcgctttttcagggccttctcgtcatgcaattgctgcaacaccacccgccggtagtgatgcccctcggttgtcttgatgtcgtacggcacccgcgtggacaaatgcgccagcttgacgaacaactcctccatctcaaacgcattcaacaaatccgccaccttcccccgccccgtcggcacaagctgaaatacactccacaacaccggcttgatttcctcaagcagcttcacaaatccgtcaaactccctgaagttttgcttcgtaaaggtcgtgttcacctggacttctatcccagcctcacgaatgttctgcagcgcctgcatcgtcatgtcccacgtccccttgatcccgcggaaacgatcgtggctctcacgattggccccatcaatgctgatggaaatgcgcgcacaacccgcctccttcagccgcttcaaatcggcctgcaaaaacagcggcgtcacactcgggctcaacgccacccgcaaccccttgcccgtcgcatacgccacaatgtcgtacaggtccggccgctgcatcggatcgccacccgtcaaaataaaaatcgccggacgcgcccgcaccacctgatccacaaaacgatacgcctcctcaccatccaactcctgcgggtgacggtggaccttggccgccgcacggcaatgccggcacaccaacgcgcaggcgcgggtcatttcccataccaccaaaaacgggtggtcgttaaaatcaaacatcggttgaccgagcatcggtatcatatctacttcgtcggccgccaaacggccatgactcacatcaagcttaacgccgaatagtttcgcgtgcaatgaaatgagtcgaattcgccaaaaaatggtcagccacctcatcccctgcttctaacaccccccacaagaggccagatggagaagtgaaaaaacataaaaaaaaatttttgacaaaccgagcaagcaagccatattaacgacagatttagtcgttattaggctaaaccaattaatatcaacgcatggccgaggggcttacggggccttcggctcatttaagtcgtctaatgacgacataattagtcgtatatgcagaacaacgccattgagccaaagctctcgccaaacgaggctctcaaagcctcttcccccaccctcgcaggcacgttggcccaaaccttggccgaccctcaagccgaccatttctccgaggaagatgcccaattcctcaaattccacggttcctatcaacaagacgaccgcgacctccgaaagcagggcaaaaaatttattttcatggtgcgtgtacggatgcccggcggcgttttgaaacccgagcaatacgtcgcactcgacaagctggccaccgattacggcaacgattccctccgcgtcacctcacgccagggcatccaatttcatggcatcattaaaaccggccttgcccgcaccattcgcggcatcaacgaagtcatgttgaccaccctcgccgcttgcggcgatgtcgtgcgcaacgtcgtaacaccgccgccggtgctgcacggtttggtcggcgagcaggtcctggacgatgcccggctgctctccaaatctctcttgccgcagactccggcttaccatgaaatttggctcaacggagaaaagctccaactggaatccgaagccgcaaagaactttgaagaccctctctatggcaaaacctatttgccacggaaattcaaaatttcctttgccattccaccggtcaatgacgtggacatctttgcccaatgccttggcttcattgccatccaagaggacggcaaggtcagcggttacaatgtcgtggccggcggcggcatgggccgctcgcatggcaaccaccagactttcccaagactggccgatttaatcggctacattccccgtgaggcggtggaagccacggcctgggcagtcgtcggcatccatcgggatttcggcgaccgcgccaaccgaaagcatgcccggttgaaatacgttctcgctgatcgcggcgtggactggttccgtcaacaattggagcaacgcctgggcttcgcactggaaccggcacgccccttcgtcttcacccgccagggagacctctacggatggcggcaacaacccgacggcacttggattttgggcatgttcatcgagaccggccgcatccgtgatacagaatcgcgccgtttgaagacggccctgcgccaggtggtggagcaatttggattggaagtccacctcacccccgccaacaacctgctgcttgttggaattcaagacaacaaacgcgcagacgtgacccgagtgttggctgagcacggcgtggaccctgcccaacgtgtcagcgccgtgcggggcgcctccatggcctgcgtcgccctgcccacctgcggcctggccttggcggaagcagagcgttttctcccccaattgatgacgcacattgaagaagccatgcaagaaacaggcctggccaacgatgaaatcatcatccgcatgaccggctgccccaacggctgcgcccggccgtacatggcggagattgccctggtgggcaaggcgccgggacgctaccagctttttgtcggcggcaatcccgccggcacccgcttgaaccgtgtgtacaaagacacggtcaaagaaactgaaatcgttgccgaactaaaatccctgttcgagcgttaccgccgggaacgcctggccaacgaacgtttcggcgacttcgcagcacgagtcttgtggcttgagaacgccgctcaaaacaatcaagcgcccgcggtggtgggctaacccatttcgaccatgttaaccgaagtagaaataaaaaactggaacgaccactggaagggcaagccagtccaagaactggccgagtgggccatcgtcttgggacgcggacgcgcagtggtcaccaccaatttccgcccttacgaggccgtgctgttgcatctgctcacgcgtatccagccggacatccccgtcatttgggtggaccacggctggaatcgccccgccacttatcgccatgctgaagatgtaacacgccgcttgaagctcaatttgaaagtgtacacccccaccatgaccgtcgcccgctatcaggccctgtacggcgacccgccccaccccgaccaggaggaggccctgcgccaattcagccaaatcttcaagctggaaccctttcaacgcgccatgcgcgaaatggctcccctcgtctggctgacagcgctccgccgtcaacaaaacccgcatcgcgccggcatggatgccatctcactcgatgccaatacggggcttttgaaaatcagccccctcctggaatggacggattcagaaatggacgactacctcaaaaaacacgatttaccggtggaatgggattacttcgacccggccaaaggggaagaaaaacgtgaatgtggcctgcatgtccggtgggaccacgcccaaacggggcgttaaacctcccgctcattccttgaagacactcggcccatacacagcaagcacatcgttaaaccctgcacccaaacttttcgatccatgaccagctatcacttggaccatttgcaacacctggaaacggaggccatccatgtcatgcgtgaggtggccgccgagttcgagcgcccatgcctcctcttctccggcggcaaggactccatatgcctgcttcgcctcgcagaaaaggccttccgcccttccgacatccccatgcccctcctcaatgtggacaccggccatcactttccggaattgaacgaattccgtgaccgccgcgcccaggaattgggagccaaactcatcgtccgtaaagtcgaagacgccatcgctcaaggtctggccacgcccgcccccggcgaaatcagccgcaataaactccaaatccctacccttctggccgccatcgaagaattccgtttcgatgcctgcatcggcggcgcacgccgcgacgaggaaaaagcacgcgccaaagagcgtttcttcagcttccgcgatgccttcggccaatgggaccccaaaaaccagcggcccgaaatctggaatctttacaacgcacgcgtcaacccgggcgagcacatgcgcgtctttccgctcagcaactggaccgaactcgacgtctggcaatacatccgtcgcgagcgcctggaagtgccctccatttatttcagccaccgccgcctctgcgtccgccgcaacggccaatggctgcccgtaaatgatttcttgcccccgcgccccaacgaagaagtgcgcgagctcgtcgtgcgcgtccgcaccatcggcgacatcatcagcacgggcatgattgaatcccgtgctgacagcctcgaagacatcatcgccgaaatcagcgccgcgcgcgtcacagagcgcggctcccgcgccgacgataaaacctccgaagccgccatggaggaccgcaaaaaagcaggctatttttaagggttaaccaagggactgaacatgcaaacctcattgtcaacagaacccaaaagcgccattgccatcggccactccgccgaacactcacgccccgcgggacacgccgtcgaaatcctccgcttcaacacctgcggctcggtggatgacggaaaatccaccttgatcggccggctgctctacgattccaaatccttgatggaagaccagctcgaatccctcgagcgttccgccgaaattaccggcggcggtcaaatcaacctggccaacctgaccgacggcctccgcgccgaacgcgagcaaggcatcaccattgatgtcgcctatcgctacttcgccacaccccgccgcaagttcatcgtcgccgacacgcccggccatgtccaatacacccgcaacatggtcaccggcgcttccacagccaacctctccgtggtgttggtggatgcgcgtcagggcgtcaccgaacaaagccgccgccacaccttcatcgcgtccttgttgcgcatcccccacctcatcatcgccgtcaacaaaatggatttggtggactggtccgaggaccgtttcctcgaaatccgcgaggcctttgaggcattcctgccacgccttgacatcaaggacgtgaaattcatccccatcagcgccctcaacggcgacaacgtggtggagccctcccgccacaccccgtggtattgcggccccacccttttgggacacctcgaaaccgtccacatcgccagcgattacaacctcaacggcttccgactgcccgtccaatgggtcaaccgcccccaagccccccgggacccgcgctaccacgacttccgcggttacagcggccagattgcaggcggcattgtgcgggttggggaccccgtcctcgtgctccccgccggcctcaaaagccgcgtcaaagaaatctggacctacgacggctcactccacgaagccttttgcccgcaatccgtcaccgttttactggagcacgacattgatgtgagccgcggtgacatgctcgtgggctttgatcatctccccggaatggacaacgatgtcagggcccaagtctgctggatgaatcaccggccgctccaggccggccgcaaatacctcctcaagcataccacagccacggtccaggccgtcgtcaccgacattgaacaccggatgaacatcctcgcctttgaaccggagccggccaccgagcttgctttgaacgacattggccaggtccgtttgaaaacctcccgcccgctcgtctatgacggctacgccaccaaccggctcaccggcgctttcattttgatcgagcccggcaccaacgccaccgtggccgcaggcatgttgctcccgccccctcgggccatcaccccggaataccacgactttattatttaaaactaaggattgggcgcagtctcccgcagcggcagcgccccgggcacgttggaaaaatcaaaatccaccaccgcctccgcggcaagagtggccaccaccgatcgcaatttgaccacattgccaccggtggggtgattgcggttggcatacaacaggacaaaagtccgcgaaaacggatccacccacaggctggtgcccgtccaccccgtatgcccatacgacccaatcggaaacaccttgccccgcggccctgcataaggcgaatcaatgtcccatcccaatccccggcgcgcactgccatccgccggcgattgcaccgacgtcatcaatttaatggtctcttctttcaaaacgcgccgcccatccaattcgcccccattcaaaagcatgcgacaaaaacgcgcagtgtcggccaccgtcgtaaaaagaccggcatgcccagccacgccccccatccgtcgtgccgtcgggtcatgcaccacgccgcgcaacaccactccccccacccgttcagtcggcgcaatttcccttttccattcctccggcggcaaaaaccgcgtctgcttcatccccagcggctcgtaaaatttttcgcgcgccaagtccgcaagagattttccggaaacccgccgcacgatttcaccaagcaggatgaaattgacatcgctatagcgaaacaccttgcctggagccggattcggccgctcgctcactgcctgagcaatcgcgcccgtgtaaccgttgaaatcacggcgcgtcaaccccgacggcaaccccgagtaatgggtcagcaacagtcgcaccgtgatcgcctcccgcccttgtccgacaaattccggcaagtatttggacaccggctcatccagcccaattttgccctgttcccacagccacatcacgcagggcgttgtggccatcaccttggtcaacgaggccgcatcaaaaatggtgttggtggtcatcggctccggcgcaggaatcacggcccgctgcccgtaagccttgatgtacgccgtgccctgccgttcaatccatacaaccgctccgggagtgtcaccgttggtaatggccgccgtgatggcctggtccagttcaacaagtttctccgcgcgaaaaacttttcccgacccttccgccgctggcgcaacaggcgtgctcaacacccagagcaggccgaacagaagttgaagaaaagcccgccggctcaggcttggttgcgccttttgctcatggtttgaaatcggcatcattcaatagattagatgttacgcagcctgaataagttaccatttttcaagctgttggagctccttcgcccaagccgccttcaatccccctccccctcgtcctccccggctccgccgttgccgctgccggcattgtactcgtgcaacttgttgcgcaacgtgcgcacactgatccccagcagcttcgccgcgtgggtccggttgccgccgcacttttccaacgcggccaaaatgtgtcgcttctccagctcggccagcggcaccacttcaggagtggtggctgcagcagccgatgttggggcaggagccgctgccgctgcggcgggagaaggctccacggatgctggcgttgcgctcaacgccgacgtccgcatcaaccccaaatgctccggctcaatcatcccgctgtccccgcacagaatgacggcccgctcaatgacattctgcaactcacgcacattccccggccaatcatgctccatcaaggcggactcgctggccggggacagtcccgcaagtttcacaccgtgcttgcgcatgaagcgttgcatgaaatgccgggacagcagcaggatgtcctccttcctctgccgcaacggcggcacaagcaccggaaccacattcaaacggaaaaacaaatcctgccggaactccttgcgggcaacactttgctcaagatgccggttggtggtggcaatgacccttacatccacccgcaccgtgcggttgccgccaacccgctcaaactcacgctcctgcaaaacccgcagtagcttggcctgcaccgccggcgatatttcgctgatttcatccaaaagaatcgtgcccccatgcgccagctcaaaacgtccctcacgcttgctcaacgcccccgtaaaggcccccttttcatgcccgaaaaactcgctctcaatcaggttttccggtatcgccgcgcagttgaccttgatgaacggcgcgccgttgcgtggactttgctgatgcaacgctcgcgccaccaattccttgcccgtcccgctctcaccctgaatcagcacggtggcctccgtgcgcgccacccgccggatgagctgccgcaaatcctccatcgccttgctctgccccaaaagctgcgacgcatcctcatcctccgcctgccggccgtaaaattggttgacccgcagcaactgggtgaactctgcagccttccgaatcaccacctccaactgctccgcgctgaacggcttgataagataatcaaacgccccggccttcatgcactccaccgccgattccaccgtggcgaagcccgaaatcatcaccaccaaaggccgcacgggacgggtgttgagccgcttgagcaaatcagtggcatctccatcgggaaggcggatgtccgcgatcaacaagtcgaaattgtcccgcgccagataatcctccgccgccgctatggtttccaccgcggccacgtcataccgacgtgaacgaagctgctgctcgaggtttttgcggacaatcaggtcgtcttcgagaacgatgattttctcgatcggcatgaggccattatatcaagcgacctggtgtcggcgatataattctgaaacgtacccctgcccggataccggcggcggcgtgggccagtgttgcggcggcaccaaccccaaacgcaaccgcgcttgttgattctcgcggtccaacgtcaaaagccgcaacaccagcccctgagtctcttccaacagcgcccgcagctccggagacatcaagcgcctttcctccggctttttctcccatgcctgcctctgctcccgcaggtgccgcgtgacttcctccagccggggcagcaattgccgccgcaccgcatcggctctcgccaacgcctcaacatcgccgttttgcaacccaccggcctctgtctcaaaagccgccagcaattcccggcacaattgccggtgttcctgcaaattttgaacaaccgcttccatcatgaagggggcactggagtggacatttccggtggcgtctgactggcatttcccttgggcagggaccgcgtcggcagcatgtgctccgcctgagaacgccattgcaaaaattgaatccgccattgcgccatttccatcaacgccttcaaccccggcgtcggcgtgtcgctcattttacccgccagcgccactacctgttgataataatcacgcgcccgctccggctgtttcatgtgctcgtacaccagcccgatttgatacagcactggcccctgccatcggggcgacggatccaaattcaaaaggctcaagtaaatttccagcgcattcagaaaatcgccctcttgatacaattggttggccagctcgtttcccgtccgctgctgccaataggcccagttctgcgggtttttcgctgcatcccgccgctgcttctccaacagcgccaaggtctgctgcaacgcctcccgattccgccccaaacgcttgagcgaagtggccagcaaaaaccgcacttccgcttcatcaccgcttcccccgtacttctgcaggtactcctgcgcctgcgccaccagcgtctcgtgctgccccagatttgccaggcacttcaaataacgaaaatgcatccgctccttgttcaactcctgcgaatccaatcgcaataatcgcgcataaaactccgaggcttcagcatactgcccgcgcccaaaataagtctcggcaatttccgtctgcgccaacaacaccagccgctggtaatattcaaattgatcgagccgcaacgacaacgcactcgacagcaccgcgtaaaatttactcaaggccagcgctcccacacccatctcccgatagagaataccctgccgcaacaatatctccggcaccgccgggtcatcgtggtaacgcttgacgtactgggagaaaatctgctgcgcgcgccccagttgtccctcctgttgggccaccagcgccaactcaaacaaggctggccgtttcaactcctccggcgcgtcggactccaaaatcccaatcaaaacagccgccgcctgccggtgatcccgcatcttccgcaattcccgccccgcctccaactgctcctgaaactggcgcacccgaaagacatggttggaagtctgcaacttcaccgtcagcaaattgctgcttgttatctgcccgggtgccggtgggttggtcaatgttccagctccccagcccggcggcccagctttgatcagccgcttgacataatcatcaatcaaaccggctgccgggctgttggtgacgacttttaagttttcattcgtgccggccaccgacgaaggaggggccgaagtcgtcactgccgtcggcgcattggatgcctgcgagcctgagccccataaatgagcattcacccccgccatcccaaacaccgcagccaaaatccacccccaccatcgcaaacgatggcctgaaaaatagccccccctgatgtctgataaatccctcatggcgaagacggctttttaggttcaggggtttcgtaacgggccgagctgggcggaatgcgtgcaggttgcggtggctgaaacaatggcaaggtgacaattacccccgccgcattggtacttcccaccggcacaggtgttttgaaatattgcaccaacatctgcggagtgatttccggctccgaggaagactgcaccgctgaagccgccggcaacgtcacttgattggtggccacctccaccgaagcggccggcggctctgaaatcaccggcacttcattcgtggcaggcggcgccaccaccacaacattggttggcggaaccggcggcggcactggattcggcggaatgatttcggccgcggcccccgggccgcccaccgtgccgggaatagccgcctccgccgcagccaccggtgccgccttggacgcacgagcaggccgctcaaaccgcaatggtcccggccccaaatacggcaaataagccgctggcgccggccatatcgcagccacactcacggccactatgacccagcttcgtaacacaaaatcgcccagttcgttggctcttttccaagctccctcgcccctgcaaggcaggaagcccagtatctcggagaaattatcggcaggattcggtgaaaactttaatccaatttcactcctccaaaatttcccgccttcgagagaaagttttccctaatttttccatttttggcgtccaagttccatgcagaagtgcctgcacccgttaaggttgcaaccagccatattctcacctgacatcccgcccgcaaaaagctacactgcccgcacgatgcaaaccttggacaccttgggcattattgccggcaaccggaaccttcccctcacgttggcgcgggaagcacgggccgccggcatccggcggctggtggcagttgcctttgaaggtgagaccgaccccgccctcgcccaactggtggacgaaattgagtggctccgggttgggcaactgggacgaatggtcgacgcatttaccaagcgcggtgtccgccactgcgtcatggtgggccagattgccccccgcaacctcttcgatttacgccctgactggcgggccgcaaaactgctcctgcagctcaaagagcgcaacgcccacaccctcttcggtgccatcgccgatgaattggcccgcgagggtgtcaccctcatcgaggccaccccttggctccaatccctcatgcccgaccaaaatttccatgccggcccgcgcctgagcgacaatcaaaaagccgacatcgccttcggccatcggatggcgcaggaaatcgcccgcctcgacattggccaaacagtcgtcgtcaaaaatggcaccgtcctggcagtcgaaggctttgaaggcacagacgcctgcctggccagaggcggggatttggcgggcaaggacggtggggccgttgccgttaaagtggccaaggccaaccatgacttccgtttcgacatcccatgcgccggccccaaaacagtggaagtctgtgcccaacacggagtggccgtgctggcagtcgaagccggccgctccctcctgttggaccggactgaaatggaagccctggcaaaacagcgcaaggtgaccctcgtcgccgtgccacccacgccggccacaacataaactacggcgtaagcgccgtcttaaatcgaagtcgaggtctccaggaagccttgcaactgccgcaaccgtgtcggatgccgcatcttgcgcaacgctttggcctcaatttgccggatgcgctcgcgggtgaccttgaactgcttgcccacctcttccaacgtccgcgaataaccgtccaccaatccaaagcgcagctccaagaccttccgctcccgctccgtcaggctggccagcacgtcgttgaccttttccttcaacaaactgtaactggtcatgtccgatgggttctccgccgttttgtcctcgatgaaatccccaaaattggtgtcgtcactgtcccccaccggcgattgcagagagatgggttgctgggccatcttgagcaccgcacgcacccgctccaccggcatctgcatttcatcggcaatttcctccggcgtcggctcccgcccaaaatcctgcaccaactgcttctgcacccgcatcaatttattgatggtctcaatcatgtgcaccggaatgcgaatggtgcgcgcctgatcggcaatgctgcgggtgatcgcctgccgaatccaccacgtcgcatacgtgctgaacttgtaaccccggcgatactcgaatttctccaccgccttcatcaagcccatgttcccctcctgaatcaaatccaggaaggacaacccacggttggtgtactttttagcgatggatatgaccaagcgcaggttggcttccaccatctccgtcttggcctgcatcgccttgcgattgaaatgctgcaattgcttgaacgcctccaggtattcctcacaactcatccgcaccatctcctcaagcgcctgtttcttccggatttccgcctgaagaatggactgtatctgcggattcttcttttgagcctcaagctcctgaatcgtgcgcaaacacgtctggaatttgtccaccacgttttccgccacattggcgatttcctcgatcaccttctgcttgtaataaaacttgggaaaagtcgcctgaagcttcgcatcgagcttcttgaattccttcatcaacttttccttcttggcgggcgaggtcgcagccaccatttcccggtacttgtcatccacctcccgatccatcgccatcaccgttttaaccagccgccgtaaatccttgaggtgattttcccgtccctcaatctttttgtccacaatcacccggtcaaaccgttccttgggcggctcgctgatgagtttctccgccaaagccacgtgctccttggccgtaaagccaaagctgtacacgatccgcttgacctcgttttcagcgtcttcgattcgcttggatatttccacctcctgctcccgcgtcagcagcggcacctggcccatctgcttgaggtacatccgcaccgggtcatccaaaatgtccagccggtttttatcgtcgtcttcctccggctccggctgctttacccggtccacctccgcctgatctacaatctccacctcaagattccgaagcttggtgtagatgtcatccagctcctccggtgtcaccaccgaatcaggcagagcgtcattgatatcattataagtcaggtatccctgctcctgcgccaatcgcaccaattccttgaccttttccgccaggtcaatcgtctgcggttgcttgttgggatcctggttttcatccaccgcaacaggcgcagcttcctccatcgccgtcttcgcaatggattttgccgttttcacctcgcttttagccgcggccttggcaacagcctcgccgcctttcttcgtttgcaactgctctgcctttttgctctcagccgtttctttaaccttcaaagagccgggctttttatccttgttttccacttcggcaggcttgaaatccttcttcttcggtgggacgccatctttcggcttggcctgggcagaagcagacgctgccggtttggagcccttggcctgggaaggttgggcgtgggccttcacttccttattggacgataactttcccttgccagccttcgcggctggctttttcacctgaggttttgccatagatgcgttttagaactatcggctacaaattctcgttataataaatagccttatactttaacgcttttctgttgtgtagtcaatctttgcttcaaaatcaaactttgcccacccttgctgccctgttgaaggcgtaaggtaccacgtaaaaaacactacatttccacaaaacacgggcctgtcttccccccctcccctcgatatttccacccggttataatccatttgtaaccttttccgccaaaaatgctcttggtatagtgtttggaacgtaggcggccaaccaactgcatccgccgcctaaacgccactcatatctgtgggcatgaccgaaacggtccataccgaagtgttgccgctccattcgacggcggatttcaccgccgcagtggagaaagccgccgctttgcttcaggctggcgaagttgtagcggtccccaccgagacggtgtacggcctggcagctaatgccctcaacccacaagccgtagccgccatctacacagtcaagggccggccttcccgcaatcccatcatcgttcacgtggccgatgaaagcatggcccgccaatgtgtcgcctcctggcctcccgctgctgccgccttgtcccgtgccttctggcccggacctctgaccatcgtcctgcccaaggcagccatcatccccgacatagtaactgccgggggccccaccgttggcgtccgctggccgcaccatcctttcatgcaagctttgattcaacgttgcgcctttccactcgctgcccccagcgccaacctttccaatcgcgtttctcccaccaccgccacccatgtgcgccaacacttggaaggacgcatcccccttatcgtggacggcggcccctgccccgtcggaattgaatccaccgtggtggcccttaaaggtgatgtttggcgcatcctccggcccggcatcattcacaaggacgctctggccgccgtcttgggcaccggctctgctcatgaggccgcctcacacgatagcaaccgccctgctttggaaagccccggccttctgccgcgccactacgcccctcgcgcacaagtgttggtttgggcctgggaaaacgaagactccctgcttgcgcagattcgccgcatgggggcaaaaccggaggaaacttacgtcttggcgcactcctgtgcgccccgccaaaaggactggcttgaagtcagcgttgcaccgcgtgacccggaagcctatgcacgcgccctttacgcggaattgcaccgggcggatgctcacaatgcacggtggctggtggtggaacagctccccaccgatggcccatggcaggccatccatgaccgcctccgccgcgccgctcaacatgaagaaacttgaattttacgtcggttgttgattgccatgcctcaaccgcgttacgatgaattgacgttttgatgaaaaacttgcaagctcgaccaatgacacgactgggaatcatcgcaagcctggtggccgtcctcggcgccacggcctggggtcagaccaaccatctgacggaacgcgccatttctttggatgaatgtctggaaatggcattggaaaacaatttcacccttcgcattgagcgccacaacatcgagcaagcccgcttcgacctcaggcgctctcaaacagcctacgacccgcagcttttctttggcctcacccgggccagaaacaccggcctcaaccaaaacttcgatttattgggcaatcgctccgagaactcctcccaaaacacggtggacaccctcgaatacggagtcagcgggctggggcccatggggtttgaatactcggtgccagtgagattcacccgcagcttcggcgacggctacacgtacaacaccctcgatctcaacaccttcaccttcgtgccggtgggttacgacgagtacgctgcccgcttcaacatcgaaatgcgtcagccgttgctccgcaacttcgctgtggacaacgtccgccgcaccatccaggtcaaccgcaaactgctcaaaatgtccgagcaccagtacgaagcccgcctgatggaaatcatcaccttggtggaactggcatactatgaactgatcttcgcccgcgaaaacgtcaaagtccaggagaaggccctggaactggccgaaaaactcctcgataacaaccgcaagagtttcaatgtcggaagcatggccattctggaagtgcaccgcgccgaatctttggtcgccagcacccgcgccgacctcctggccgcccagcaattggtcaaagtgcaggaaaacgtgctgaaaaacctcatcaccaaagacctggccgagtggaaacaagtttccttgagacccaccgaatccctgatggccattccgcaagccctcgacgtgcgcgaaagctggcgcaccggtttgaccaaacgccccgacctcgcccagttgcgggtggacttggaacgccaggacattgacatccgttacttcaaaaaccagaccctccccaacctgaacctcgtcggttcttacggacgggatgccctcggaacgggctttgaaaacacttggtcagacctccatttccgcgacaaagccgtggactactattacggcgttgaactcagcttcccatggggccgtcgcgaggccaaataccgtctggcgcaggaaaaagaccagcgcctgcaaaaggaattagtcctccaaaaactccagcaggacatcctggtccaaattgacgatgccatcgaagccgttaaaaccagttatgaccgcatcgccgccacacgccaagccgctgattttgcccaaaaagtcctccaatccgaggaatccctcatgcgcgtcggcatgagcacctccttccaaatcctgcaataccagcgcgacctcaccgcagcccgcacccaggaagcccgcgccatcgcggattacaacaaggcattggctcgcctagcccaggcggaaggctccaccttggaacggcgcaaaatcaaattacaattcaaataaaaccgccccggaaacgcgaaggttaaaagcctctcttgcagtggctgctgctacctgctgccaattcgaaaccaaaagcactgcgggaaaacttcccgcaattacaccagcccctccaaaatcatcggcaaccgctccaagctgcggttaagccctgcccgcgcaatggccttggcactgtcggtttggttggggaacaacaaatgccatgccggcgtttcaaaccacgcttccgccgccacgctctggtaattcccgctggtcccgatttgggcatgccgcaacagcagatccgccacatgcaccgccgccacaatttgaatatgctggctggcgcgctcgggcgcatggtgaaaccgggccgactccaccatcacctgcggcagtcggtgttgctccaaatacaacccgcccaactccgcgtgatccatccccagcacctcaatttcaatcgcctgcaacggcgcttttgtctcggatgaacgccggtgaatctcggcaaaatgctgcggaaacaccgcggccatcacaattttgcccacatcgtgcaccaatcccgccacgtaatccgcctcgtcattgggcattcgcaccgccgacaacacttcccgcgccataatcgccgtgccaatgcaatgacgccaaaactcccgccatggaaattccgtgttgcccgccatcttctgaaaatcctcgatcaccggcgtcaccatcgccagttgccgtatttgcctcagccccagataaaaaaccgcctcctcaatgctgttgaccggcacattcagcccaaaataaaccgagttcaccaaccgcaacaaccgcgccgtcaaactagggtcccgccgaatcacctcgctgatttgcgccgtataactctgatcagccgccaacaactcccgcagcgcactgttgacagtgctcagcgatggcagacgcgggcaggaatgtaaccgcgccgtgatctgttgccggttcagcggcgtcagccggttcgtagtggccacttgactcatactcatcttccctatcggcagtcagaggaaccaactttaataaataataaaaaaagacctctggttaccctcccagcgtccgatttttagacctccacaatcaaacagccttgggtagatacacagaagccgcgcttgacggcctgccctgctttggttaccaaagcatcaccaatacagcacaatacattcgcgggccgggccggtttggcgtccctccccgccttggaaaatcacatgaatactgagaaaaaaggcctgtttgtcaccgccgacggcagaaacgtcgccttcacctttgcgctggtcagctcgttgtttctcctctggggattctgcaacgggatgattgacgtgatggacaaacatttccaaaacgagctcaaactcaccctcagccaatccgcctgggtccagtttgcccattacctcggctatttcatcatggccctgccggccggctggctggccatccggctcggttacaaaggcggcattatcgcaggcctcttgatggtggccgtagggggattgtggttcatcccggccacacacatcgccaagttctgggcctttttacttggcgtctgcaccatcgccgccggtctgaccttcctcgaaacggtggccaacccatataccaccgtcctcggcgacaaacgcttcgcagccactcgcatcaacctggctcagtcctgcaacggcgtcggctggatccttggccccatcgccggcggcctcttcttttacggtaccgatgaaacaggacgcagcaccggtgccgaaaccttgtggatcccttatgccggtgtggccgtggtggtcatcctcctggcggtgattttctttttcgcccccatgcccgacatcaataccgaggacgactatcacctcgacgataaaaacaatgacaaaaccaccgccattaaaccggcttcccgtgggctgacctacgggttgttactcgtgaatatcgccatcctgcttttggtgtttggaatgataacatggctcattctcagcgcgaccaaagttggcgaatccctcaaaggcctggccgctgccctgccgcatccttcctccttcaccatcaacgcagaccacgccttgaccgtcgtcctgttttgggcgggcgtcgccatcatgatcgtagcggccattgtcatggcccccatgaccaaaaaaatctcccaccacagcatctggtcccacccccatttctccggggccgtggcggcgcagtttctatacgtggccgcccaggcgggcatcttcagcttccttatcaattacgtgacctcagaagtcccggacctccccgcctcgtggcaccgcgacagcaccaaaaaatggattgaaatcaacacctccttcacacgcgatgacctcaaggatttgcctgcgctggcggctcgattgaaaaaccccaccgaccccgtgacagccatggtggccggcaaattgtcctccgacactcaggcagccctcgcagagtacgtccccgacaaaaccaaccccaaattgctcagtgtgcccttggtgcaggatttgaaaagcattgtccgcggcaccaacatctacaatccccagctcttcgctggtgtcaacctcagccccgccacccgcgaaatcctggccctccctgaaaaagaacgaaacacacccctcctcaaccgcctgctccttacagacgcctttgccggtttacttaattataccccaggccgttattgcatcagtgacgccggcgcttccaacctcgcctctttcggattcttctgcttcttggtgggccgcttcaccggagcctggctgctgaaacgtttctccgcccaccgcatgttgggcctctacggcctcatgaacgtgctggtctgcctgctggtgttcttcaagctcggctggctgtccgtggtgtgcgtcttcctcagctatttcttcatgtccatcatgttccccaccatctttgcactggggattttcggcttgggcgtccgtgccaagcgcgcctcggcttacatcgtcatggccatcatgggcggtgccatcctgcccaaactcatggggtacgttgctgaccaaaccaacatgtcccgcggtttcatcgtgccgatgatttgcttcgtggccattgccctttacggcttcggttggagccgcctcagccaggccgaatccttaagcggcctgaaaaccaccgccggccactaaaaacaaggctcccattcttgcaccacccccctgcgctggggccggggctcgtcttgtcttcaaccaatccgcgctcacactttctccggcaccacaaacggcggacggtactcgcgccgaagcagccgatccgcctccggattgttcacaaacttttccttgtcggcatcaaacatcaacttgggccccacccacaacgtcgccttctgcgggtccacaccaatcgccttggtgttttccaaagtcgtcatgatgctctcgcccaccacctcgttatcgctgaaatccttcggcttctcaaacggtcgctccttggccaaccggtaggatatattgcccaaatgacagcacgcgctcgaaaggtgcccctccaaaatgtctgcgtgcagattttcccgcttgcggctgcgcacgcactcgatgaaattggcgaaaatattacccgagcgcgacggcgcatccaccttggccaacggctccccttcggttttgtctttggggaaaaacttcccatccttcaccacaccggcctcaaagaaatattcattggcaactttgttgggatactccttgagcttgcccacaagcccccgcgtctcaaacaacagcaatgtcccaccaaaatcgagcaccgtcaccatctgattcggcgtctgcccttggtccttgtgatccggcccctcaacgtaccgcccgcccaaactgatgaccgatcgcggcaacgtcccaccaatcacccaccgcgccacatccatctcatgcacaccctggttgccaatgtccccgttgccgaagtcccaaaaccaatgccagttgtaatgcaccaaattccggtgaaacggctgtttgggcgcaggccccagccagatatcaaaatccaaattggctggcggttcctccacaggcttgaaaccaatgctccatcgtggcttgcaacaatatcctttggccaccaacaacttcccgtaaacaccgcttttggccaacgccaccatccgcacgtccccaccggcgcgccgctgcgtcccgtgctgcacaatccgattgtacttccgggccgcctccacacatttgcgcccctcaaacacattgtgactgcacggcttctccacatacacatccttgcccgcctgacaggcccaaatcgtggccagcgaatgccaatgattcgtcgtggcaatggagactacgtcgatttccttgttctccaacatcttgcggatgtcctgataagtctgcaccccctgcaacttgctcgcacgtccctccaacaccttcaaatccacatcgcacaacgccgtcactctgactcccggcaatttctgaaactcgctgatatgattggccccacgcccgtttattcccaccaccgccacacgtatggcctcattggcacccacggattgcgcatacacacgcggcgccagccagatgccggcggcccccaaagttgcggttttcaaaaaagcacgacgcttcaacgacgaagactgcatgtaggctttcatgcccccactctaatctctccgcgccccgcttcaatcccaaactccaactcccaccaaacaccgactaattatagatgaatggcagtgcaggtcttcccaacataagatgagcttgcgcttgcccttccacgccgcggccttacattgagcgtgtgcatgatgcttcggatgattggcgccggcgttttgaacgcctgcaacagttataccacgtcagccaggtgctccattccactctcgaacctcagcgagccctggaactgattgtggaacaagccgtgcagctcaccggcgccaccagtggttcgctggttctcctgaatcctcataccggttttttggaaattgaagcctctcacggccttccacccgaggctcaaaaactcaagctccgcgccggcgaaggcatcaccggctgggtcgtccgcaccggccagccggcactcgtcggcgatgtccgcaaagacccccgctacatcatggcacggcccggcgtccgctccgaattggccgtccccctccaagtcggcgaagaaattcgcggcctcttgaatgtggactccgacaaacttaacgccttcaccgccgaagaccaatccctgctggaagaactctccgctcaagccgctctggtcatccgccaaacctggcaatacgaacaacaccggttgaaagcccggctgtttgaaagcctcgtcgccgtcagccaaatcatcaattccaccgtcaatctggacgaagccctcgccgccatcacccaacaggcctgccaactcatgcaggcacgcctcagctccttgctcctgctcgatgactccggacgctggctggacctccgcgctgcgcacggcgccggccccgactatatcaacaaaccgcgcctggcagtcgaggacagcctggtgggctccgttgtgcgccgccgcaaagtgcttcaggttgagaacgtccaaatctcccagcgctatcaacacgtcgaagtcgccgcccgcgagggtctggtctcgctgctcagcgcacccctcttgtttgaccaacgttgcatcggcgtcctcaacgtctacaccggccggccccacgtcttttccaacgaggaaatccgcatcctcaacgccctggcgggtttatcggccgtcgccatcgaaaaagcccgcctctacgaacgggtggtggacctcgaagaagccctccgccaagctgaaaaattcagcgcactcggcctcttggccggcgaagtcgcccacgaaatccgcaaccctctcaccgtcatgaaaatgctgtttcattccctgaacctgcactttcctctgatagacccgcgcaataccgacgtgcgcatcatcgccgacaaaatggaacaattggaccgcaccgtcgaacgcgtcctcagcttcgcccgcacagccgagccccagtttggccccgtgcacctccaacacgtgctcggcgagctggaactgctggtccgccacaaattgcgccagcaaaacatcctttggaaactcagcctcgaacccgccctccccgccgtttggggcgatgccacccaactggggcaagctctcctgaatcttgtgctcaatgccgtccaagccatgccccaaggcggagaattacgcatctccgcccgccgcctgccgcgcgaccccacccgccccgccacccatgtagtcttggaagtagccgacacaggcgaaggcatgagccccgaacaatgccgccgcgcctttacccccctcctcagcaccacccgcaccaagggcaccggccttggactggtcttggtgggccgcatcattgaagctcaccacggacgcatccaagtcacctcccgccccaaggcaggcacacgcttccgcatcacgctccccgttgaaaaccaaaatcctgcgtaattccccccaatcgcctccggcggcccccttgacatcaagttgaacgtgggacaagttgccattgttgtattatgaattttgcgtggcttagcctggaccttgttttgattgtgctgtttgccttttcgctaccggcacttttcctatatgtcatccgccggtggctccaaaacagcgaatcggcaaacccatcggtggacaaccaaacaccggacccaggcaaccattcatctcactgaatgaccaacggattttttctcgccttcttcgcggcttcctcaaaacaggctttctaatatgcttaagccctaaggaggctcaagccatagggttgtatgccgctcactctttgctcgggaaaaaacagctccaccgattatttcaccattagatctcccttgggcactgaaaaactttttcgctctatttttgctgtaaccgccttttttgatttgttctgaccccgcggctgggcttatcttgaagcagtatagcgatggaccctgcccactcaacgtccagccgcaaccatcgggccacgccacacgcgtggaggaggtgttcatgttgacctttgaccccacgcgattgcaagcggccttgcggttggctgcttccgagctggtcaaagctcgtccggcaggttctccctggcagggtgaaatttccagcagccccacagccaccgctgccgccatctgcgccctcagcctggcggataccgagtggaaaagcgccgaggacaccctgcgccggctcgcgttacatggggcggagtggttgagccaccacgccaacggcgacggcggatggggcgacaccccgcgcagcttcagcaacctcggcgcaactgccctcgcttgggcggccttcgggctggcaccgggaggcgaagcagcctttcaggaacccgcccgtgccgcagagcgctggatatgccaaaaagcgggcaataccgcccccgccatcttggcccccatgattcgcacccgcttccgcggggatttggcgctggccggtggcgttttgatgtgctgcgcactggcgggacgactcggcagtgacattcgcgcctggcgccacgtcccctccctgccttttgagcgtggagcactccctcccgaatggtgggcgtcagtccaaccgcccgctgccagttgggccatgcccctcctcctcgccacaggccaggctcgccatcacaatctcgcaggcggctgtttcgtggtccgactgctgcgcgaattctttcgcaataccactctgcgccgcctcacggccttgcaagcagaggacgggaattttcaaacctcccccctcttaactgccctgaccaccatcggcttgctcgccgccggctacggtcgccatccagccacagaaaaaggcatccgcttcctggtaacctccgcacgtcccgacggcagttggccgctgattacaagccaggacgtccgccttaccgcgcaagccacgcaagcctgcaccaaccccgtccccgggcagccgtggctgccgggcctcgacgaacttcatgccttgcgccattggcttctcgcccatccgcaacacgatgacccggagggactccgcctcccagccatcggttggtcggccagctcacaccccggcgcgtggcccgacaccgtttccaccgcagaagccctcttggccttgcgctcgctcggtgacccgggccctgaggtcattcaagccgtcctcggcggcgtcaattggttgctgttgacccaaaaccgcgatggcgggctgcccccttatcgtcgcggctggtgccacccggaacaagaaggcagttgcgccgaggaaaccgcgctgaccttgcgggcttggctggcctggttgcacgtccttcccccggaccaacaacaccgtgttcaaacctccatccaccacgccatccgttttctcatggacgagcaacgtcaagatggcgcctggcgttcacactggtttggcaatcaatacgcgcatcaggaggaaaacctcaccatgggcaccgccggagtcctcatggccctgcccgaactggtggcccgctcctatttcgagttggtcgaaccactcaacagcgccgtcctctggctcgtcaaaaaccaaaacagcgacggcagttggggcggtggccacggcggccctccctcagtcgaagaaactgctctggcactcgaagccctggccgaaacactcctccaacctggccccctcttgctggaaactcgtgaacaagcacgcaacgccgccgcctggggcgccaactggctagtccaacatatcgaagccggcaattggaccacacctgcccctctgggcttgctctggggacaattctggttctacgaaaacctctggccggccctcggcgtcacccgcgccctggcccgtttgacacgcctggtttaatcccgccaccccccggcgttgtcatccgcggcaggcggctcatgtgccgaaaaaccatccgcgacaatggcttcttcggcgaataatgcaccatcatgtcctgcatccgcatcaacacccacggctcccgcggcgcataaccgtttttggtgaacacaatgtcatcagccacgtacacacacatgtgcacagtccggacgtcctgccccatcggctcatacaacaggatgagatccccaaacaaatccgccttgggcacaatccgatactcgctccgcaacacctgctcctgaaatcgtgcatcaatgaaccggtcctccaccttgtcccggtgaaaattatacgacgaccaaaaacaatccggccacctccccgcaataatatttgtgggatgcggatacgaataaagcaacagccgcggcaccggcggaaaaaaccatgccacattcacactccccccctgcggcaggcgcttcaatgactccaacaacggccgcacctgaagcattcggttgggcagcccccaatagcccatcagccgctccacatcgctggtgggagtcacccgcaaattcaccataagcgtcggcactcgtgccaccgtccggctggcttgcagataatcctctctcgttaacagttttggcaggacatgccggtccgcaaaacacagcaaaccatctttccggtacatcatccgctccatgagcttcagcgcatcttcagacaaactgcattgcgaaaaccattcggaaaactcagcattaaccgcaaacggataacaataagccacattttgttcatcctcggccaaaatggagtagatcttggcccgcggctccggcggcatgtcccgcagcacttcaactgtcggctccacataaactcctcctgtcgtcgcctgccaacggttcgtgtccaacaagctcgcctccaacaaactcggcaacccgcaactttttatgaaatccctcaaagtctccggcttataaccggcaaaaaaccacctgttcgaggaagggggaggcggatcgtacgcaaaatattccactggccgctccaaccaaattgggatgatttccaatattccccagcggtttgttgaggcttcatccttcgccaccaaaccgttgttggatgagcttcgatcagagcgcgaccataaagtgcgaccaataaattgcgcacccaacgtaatcaatacccctgcaagaaccagccataaacttgggagaaattgccggcgaggcacggccccattctgccgctcgctccgtgatgaagtcttggctgggcgcattttcataaacagcctcccttaccactcaaacagcgcccaaagaccagccggcccaaaaacacccctctcccgtcgaagtgtttgcctgttattcgccggatgtattaatcgcccgcccttaaggacgttattcccttgcagccatcccattcaaataaagagacgggacattacctgcgaaaggttacaaggacaacggttttgtgaaaaaaattagcctgaaaaccctcacattgtgaacttacctaccagacggtaagttccgccagggacgcaaagggttgacggtcaaatccgctcacagcctccagcttcaaataacggacctgtaccggtgccggaaacgtcaattcctttggattggcatcggcggacaatgtgccccgcatcaaaggtgttccccagttttgtccgtcgctgctcgtgtaaatggcaaactcgcgtatccacccatttttattgttgtcctgcctcggcgtcagagtcacaccacgcagagtggccgattgttgaaactccaaaaccagccaatgcggaaaagccggagcttcctccccccatggcgtgtgccaaagcgtttgcacgtccccatccacgaccaacttgcccggatgctgcggatgttcactgctcacccgcgatacccggacccccagtttttccatcaaggaaggcggcctcaacaacttttgcacatccgccggcgtccaccgatgcgcgggtttgaaacgtggaccgctcatgtaattcaaaagactgcgccgaagctgccttgccaccggacgctgctccaagtctgtattcaaatccatcgcacacgccaacaaacgcccccgtcccacttgcgcctcgatgattaaccccagtttgcgcgacgtaaaccaatcgtctatcgcatacaccaacggccggaatgtcgcctccgtgcccgtcaacacaaacggatgcgcccgcgacaccaactcccaccattgccagttggaatgatattcagtcggaaaatccgccagcgccggatgcctcggatcgcaataaatgcccaaagtatgcggcgcctgacgccgcgtccacgctgtgttccaaaagatgctcgaaaaaccaatttgcacccgccccaacgcatccccgcgaatggccgatggcggcggattcaacaacaccttgcctccgcgctccaaaaccgccaaggccgccgaatccaaatcagtcgcccaatgaatatcctgcggcacactcacatccaccttggccggatacacccacacatcccaatcattcgcataaggcgtgccttccaccgccagctccaaattcaacttcgcaggcgcaggcatccccttcaatggcacctcaatctgccccaccggactgcagattccagtcggcaacggaccagtgaacatcgtccccgtcgccaactcacgcttcccctgccgcaaccgccagcgcaccacaccctgcggcaaatcctgcggtgcaaaccatcccaactccaccccggcctgcagcgtgtcctccgtggtgaaaatccgtctcggcaatcgcgcaatcggcaccaccggcccggcaaaccggtgatactccgcagccgtgatatagcccttgccatcccaaaacggatccaacacccccaccaacgccgtcccctgcccaggaaaatcatgcaaatccaacaactcgaatccccccatccccggcgtgcgtatcgccgactcaatatcctccttgtaacaaagcgcctgcaatttccccgacgccagcaaaaacgcccgcgccataggcgccaaaccgttctgcttcaaaaagtcctgaaaaatctcaaaattcttcggtttcagccagcccttgtatttcggcatctccgcaaagttgggaaacacacaccattgcccaatctcatgactcaccaccggcgccgcagcccgctggataaacgcccggtaatctgtcaccgtctcaggcggacgcgcattgatgcgtgaattcaatcccccgccccatgcctgaatgcgcggctccggtgtgatgtgaaaatcattttccggaatcatcggccaacccgccccgctggtgtaaagccgccgcgtatccaggcccttgcaataattgatgaaatcccccagccaccgattctgattctttcccgccggttcgttgccggctgaaaacatgataaacgacggatgattgcccaacacccgaaagatgcgcgctgcctcctcgtgcaaccacgcatccaccttgcgcccatcccccacactgctccccgaattcgcccaaacaccggcctccacatacaacaacatccccgtctcatccgccgcctgaaacgccgcctccgggggagtatgcgaatgaaatcgcaggtgattcaacccatgcgcctggcaaatccgcataatgcgcttccacgccgccacatccgtcggaggatagcccgtcaaagggaaaatgttgcactcaagagtgccacgcagaaaaagtttgcggccgttcaaagcaatttgcgtcccctgccgcttcacctcccgcaatccaaacgacacctcccgttgatgacgcaatacccgtccttcatccctcccctccaacgcagccgtcaattcatacaaaaccggcgaaaattcatcccacaacaacgcatcctcttccatctcatactcacactccaccaccccaccctccggagtccacgaaaccggcacagtcaccggcggcacccgatgctgccgtggtccattgtaacttcgcgccgtcaacgtcaacgtcccactgccggagcgccctgtgagattgcccaaccgcgccttgataaccgcacggcggcgagccacgtccggatacacctgcaaatcgtccaaccacacagggtccgtggccgttaattccaacacccccacaatcccattccagttgccttgcgtgtgatccgaaacactgtgcgcattgatccccacctccacatgaagccggttgtccacacgtaccgtcagccgatgccgcccaggcgtcaacgccgcagtacaatcatattcatgcggcgtccccaaactgttccgcgacccaatccggcgctcatccacccacacagtagtctcccaatgcggccgctccaaccgcaacaccacccttttgccctgccacgacgcgggaatctccacctcccgctgataccacgccacccccacataatgccgctccggttgcaaccaaaacggcaccttgatattgcccggttgccggtagggcgcataacgctcatccttgaaaaaggatcggtctatgatttggcctgtccactgcgtctccatggtcaccgggtccccaaatccctgctcctgcaatgaaccaggcaaccgcagccgctcctttaacacccggccatgccacccctcccccacaccggcatcctgccggtccagctcaaaccgccatgtccccgccaaattgatgcgctccgcagctcctgcgtaaaagttggccaatgcaaaaacaatgcatccaaaaaatccaactgccagcctttgggcgcccttgagattgaggtgttgggtcatcatgttgcaagggcagtattgcaaatgccgcactccagtttcaacacccaacaatcacccctctccaacggtggacaaaaccaaacaactcggaaatacttccaccatgaaacatacccttgcctgcatcgcactcctggcttggctggccacggccctgcccgccgccgaacgtttccccaacctcgcagccggtagcaacctcccccaaggccccggctttgcaagcaagttcaaagcagactccggcatcgccaaccatccctccgtcatcttttccgatgattttgaacagggcgatttaggggcacgctgggacgaaaaaggcgccggcaaaggcaaggccctaagcctcgtcccaccaaacgatacacgttgtggccgccgctgcatgaaagtcgaagcccgactcggcgaaaaccagggcgacggcctcaccaaatggttcaaccccgtggacaccgtgtacatccgcttctacgtcaaatttgaccccaactgcgactatgttcaccacttcgtcacacttcgcgccaaccgcggcctccgcggcgcagaccgctggagcggctttggcggcgcaggactcaaaccacgcggtgacgagcgcttttccacagccttggaaccttggggcaattgggccaagtggccgcccccgggcaaatggaacttctacagctattggcacgaaatggatgtctcccgtgatggcaaatattggggcaactccttccaagcagaaccccaggatgtcattcccaaagaccgctggatttgcgccgagttcatgctcaaacacaacacacccggcaaacccgacggcgaacaagccttttggattgatggacgcctcctcggacattggaaaggcatcaactggcgcaccaacccctccctccaagccaatgccctgaccttggaaagttacgtcaccgaccgctggacaaaaaaccccaccaacaccgtctatttcgacaacctcgtcatcgcccgcgaatacatcgggccggccaccgccccctaaatgggcagcgtgggctgcggatttgccgtccctttgtccggcactgcggctgccgcagcttgcgcagcgccattctcaacctgcaccaacgccggccgcaacaccttgccctgatacgtatatcccggcgccagcgtcaaaaggatgcgcgtgcccgcagccggtggctccgcacactgatgggcctgatgcatctgcggatcaaacccctcgcccgcctccggagaaaacgcttgcagccccacccgccgcgccaaatcacgacaaacattttggaacaacccgatttgctccaccaaatgcggctgcccgctctgccgcgccgccatgtacaacgcaaacacctggtccagcagacgcaacgtcaactgcagccaatcctgctcctgccgccgcaacttgtccgcttccaaccgcaacgtcgccttctcggtatcattggcctgccgcagaaaatccgtgaatgccttggcctcagccgccatcccgtcggccacttccttcgccgtttgcaccgtccgcgcacattcgccctggatgttcatccacgcgcccgtagcctcggctatctgctgcttgatggcctccaaattttgaatctgcgccactgtcgaacgcaacgcatccgcctccgccagcttcatctcagcccggtgctggagaataaacggcgtcaccaacaaccacgccccggcagccaccgccgccgtgcacagcgccatattcgccgtgctcaacggccactcgctttggtacacaatgccaccggccaccgctaataaaagcaggtcgcccaataaaaacggcaacaccgacggtctgggagtcgcaacgtcactcatgcgcccgccagcttatgtccttaggcacaacccatgcaacagcgttttaccccacccacaacatcgccactccttttgtccaaatcaaagaacccccaccccaaagcaccccgcccctctcacaccccctgccccactccttttccccgcaaaatatggccattccttgccaaagccggtgtagcaaacaaccgccggtattcataagtttttcctgccatgctgagacaccagcctgtgcgtgttttatgaaaacagtccccttccccagaggaaggggcgaataaccggcataccgccacaaccaacgcacaggcccggaccccggctggccatgcaaatgagcggaagtcattccatgggcgcgcccacggccgcagccaacgtccccgaccttcaggggaacgggatcgaaggcttggcaagccccttgccggccatgtccagcgcctacgacttcctccaaaaccaatacgtttacgtcatcgtctccgcccgcgcccgcggattatccgttggcgtcaacctgaaccccgaacgccgctgcaacttcgattgcctctactgcgaagtcccacgccccatggccggtggaaacccgccggtcaacgtcgaagtcatggcccgcgaagtcgagcgcaccctcgcctacgtccaatccaaccgcctgcagcagcaccccgtcctcggcacgctcccacgcgaatttgtccaattccgccaccttgccctcagcgggttgggagaacccaccctgtgccccaactttgtcgaagtcgtccaaacactcgtccacctccgcgctttagggcggctgccctacttccacctcgtcctcgtcaccaacggcagccagctcgaccaccccagcgtccaggctggccttaaatactttaccgccaccgacgaaatctggatcaaactcgacgccggcacacccgagtacttcctcaaaatcaaccgcacacccgtcccctacgaaaaaatcctcaacaacatactcctcgtaggccgacagcggcccgtcgtcattcaaagcctcttcgtctccgtggaaggcgaggaaccgcccgcccgccaaattgagcagtacgccatgcgcctcaaacaactcaaacaagacggcgcccaaatttccctcgtccaagtctattccgccacacgccccacccaccaacccgcctgcagccacctccccttgaaatccctcagccgcatcgcccaaatcgtccgctgcaccaccgaactccccgtagaagtcttctaacccccccgacctccgtcccacttgacagcccgtggcaaactcctacgttgccaaccatgcatcgcccttccgcttcatcctttggcatcgggcttattctggggttgctcctgaatgccccggcacccaccttcgccgcgttggatactcgcgagctgcacacagaagtcaaaatcaccattcaactgaaatacctcatctggctgccggaaggttatgccttgccccaaaaccgctctactcaatacccctgcatccttttccttcatggtgcagaaaaacgcggcacaaacataaacgctttgcaggaccttggaccgctgaaatatgcgcgcacacatcctcaagccttcccttttatagtagtagcccctttgtgtcccccgggacgccaatgggagccgttggcgttactgacattgttggatgaaatccagcgccagtatcgcatcaaccaacacgccatttacctcacaggctacagcatgggcggtgccggcacttgggccactgccatggcggctccagaccgctttgccgccatcgcgccattgtgcggcagggtcattccactgcttgcaggcaacttgtaccgcacgcccgtctgggtctttcatggtgaaaaagaccaggtcgtgcccctgaaccactccaccgaaatggtggacatccttaagaatcgcaataacccccacgttaaattttcactgctgccgggaaaagaccatgaaatatggcacgatatttacgataactccgccctctactcctggttcatggaacaccgccgcccctgacttgagtacaaccccacgccgcgatccatctaggtgaggcaaaaaacaattccccgcgcaacaacacctttgcctccggagacacgccttcacaatccccgctgctccttcctctgcccataccggccaccatgccgaaaagcaaaattcgccccccttataaattttccatttttcttttgacaaccaaacttttcggcctagagtgacctcatagcttggcaaaccacgtggattaacttcgaggtttcccaacatttaaaatttaaaaggcctgcttatgaacgactttaacctgatagaggagccgtggattcctgttatttaccacaatggcaactattgccgtgtcggcatcaagcaggctctttccgatgcccatctcatccgcgacatcgccacctccaaccccatggaccgcgcgggccttctacgctttctcctctctatagtttattggtgccatggaatgccagcccctcaagaaacgtctcggctaggtgatcctttaccggattgcacaccacatcttggtgcaaagacaaattttttctgccttttcgggcagaaacaccgtttttaccaatcaccaacggcaaaccgagaagtaaaaattggtgaactgtttcaagaaattccatccggaaacaatttctggcattttcgacatgtcaccgataaagaacatggatattgcccagcctgttgtgctctaggcctgctgcgccttcctcttttttcagtcagtggattgccagacttgaaatcggggattaatggaactccacccatctatgtctttcattatggcaaatctttagctcaaattctccgaaaaaactggttgccaatgaagcaaaacttgctgggcacgccatgttggatggaccccaccttggttccaccaatcggagaccctatcccgctgttaatcggattaaccgtcccagcacgcaaagtttggctcggacaacccattcaccatggccgttgctctttgtgcgggaacccatcaaaacacctggttttcgaggctcacattcaatccgccggtacgttggaaaattcaaattggcaagacccacatgttgtttatttcctaaaccaacaacaacgaaagtcatgcaaagctcccaatctcgtcgtaggcggtgaatttcaaatggaccgcccttatgccgatcttatggcatgtctcttggaacgggtccaatttcccgcaactgcgacaagccaacttctaattgtcggttttgccacggacaaagctaaaaatatagatgtttgggagagaactgtaactttggtccttaacgaaatgcagacaaccgcagccacagctttttccacctggtggcgaagtgtaagtgcattgtccaacaatgtttacactattattaaaacaaccccctacaatcggcctcgtgggtccaaaccctcgtatgttcactgccatttttcccacatcagaccccatgtggaacatataatatcatctaacatgcatattctagtaagtgaaccaaacgaaggttggcatgaagcacgccgtgagttcagcgcttttttgccgatgttggctcaatccctctctcccggcgtgacctcccaagccgttcaaaagcgccgtgccatcgctcaggccttgccacctaatccctgcccgaaaccggaaccatccagttcaccctccactcaaaaccccaacttgtaattatgagcgccacccttgaatacattacaaaactgtcccatataaaggccggctcccgcactttggttcgcactcatgccaatctctcattgaaccattccgtggatgcctttgatttgttcaccggtctttggtggcccttgcgccaacaatcacaatttgcaccccgtcgccgcgtggcctggctggtcgccaaacttcacgcagtcagtcctctgccacaccaaccaggccagaccctccccatccagctcgcgaagatttggcataggcagccagacaccaatacaaaaaacaggttccagcgcaaattcgatgatctcctttgccgtcccctggaccaaatggaacccgctttgcaatgggccttgagaacaattggctctgcaaatgagccatccttggactgggtgcaactcaccgacgacctctcccggtgggaacaaccgcaagttcgcgaaaaatgggccgaagtctttttaggcaggtaaactcaaaaccaaaaaagaaaggagcatactcatgaacaatcaaaataccacacgcatacaaatccatctgcttcaaaaccacgcaccggccaacttgaacagagacgatttgggagcaccaaaaacctgctacttgggcggcgtcctccgctcccgcatctccagccagtgcctcaaacgcagcatccgattgagcccctacttcaaagacctctgcggcggtgttcgcacacgccgcctcgcaaaactcatcactgaccaggttgatggcaacaatgcgacgaagaaaaaagtggccgccatcctgaagaaatgtggtttggaggccaaagagaacgacgaaacaaatatggtcgtttacaccacaaaagaagccatcagggaaatggcaacagccttgagaaacggactcgaagaacccgacattatcgccagattcaaagagcttttgagcacgaatactgctgtcccggacatggcactgtgtggacgcatgttggagacaggagaaatcaaggacaccaacgtcgaagccgccctgcaagccgcccacgccatttccacacacgaggctcgccccgaagtggattactatgtgacggcggatgacatccccggaactgatgccggcgctggttatgtggacgaagccatattcgtttccgcctgttattacaaatacttttccattgattgggcacaattgctccacaacctcaagggctacccgggcaacagaatccatctcgcagcccataccgtcggcgcctttatcaaggcagctgccttggtgactccatccggcaaacaaaacagctatgccgcccacaatccacccgatggtatcctcgtggaaatctcccccacacccatcaattatgccaatgcctttgccaaacccgtggacattggccaacgtgatttaatcggccaaagcattgctcaactcgcccagtacatccacgagatggatgccggtttcaaagtcgttgacccgtccaagcgcttctggttttcgccgggcatgcgcaatcgcttggagacctcacagcgcgccggtgatacagcaggcgaccgccaaaccatccgagtccaggcggtggaggttgatcaactcgaaaacctgatccatcaggtcatcaaggccattgacccgatcctcgactggcaggaagtccaaagaaccattctcaataaccatgaagcctgacacacttcttcttagactggaaggccccttgcaagcatgggggcattacgagtccaaatttgccatccgccgtgccgccgaggcccccaccaagtccggtgtcatcggccttctgctggcggccctcggcatcccgcgcacctccgctcctgatgattggttgggccggttaaactccctcctcatgggcgtgcgcgtggaccgtccaggtgtccgttggtgggactaccacacagtgggagctggccttaaaatgagaacagccgagggcaaaaacaaggatggccccctcctcacacgcagagaatttctctgcgatgcctcattcttggtagcccttaatggagagcccgcccttataaaagaactataccaagccctccaacaacccaaatggactctttacttgggacgcaagtgctgcccgccttcaaggccaatactggctcacgcccccggctgtcacaaagatctaccatcggcactacagtctgttccatgggaaaaacggtatgcagacgacaccacaccggaaaaacttgaagccctgctggagtggcgtccctccgaccaacaacccaatgcccccgatgacgccgaaatctggtatgatgccccccaatgcttggaacctcccgctcacggtccccgttttattacgagaactgccttctcagtcgctccagacggccaagtcaccgtggcgccccaacaccaacagcagcttcctttgccgcctccacgcccaagagcaaattacaacaactcagcataccaacgcgctcgtgataagcgtctgcacgccgatcatggcctgtgcgtgttttgcaaaaatcctgccaccaccgtccaacacatcacctaccgccgcgccggtggcaacgaaacaacagaagacctccgctccctctgccgcctttgtcatgatgccgtcaccatgatcgaatacggtttgggtttggagatgggccgcatcaacccggaagacccccaatggcgcgatgccatactcaagaaacgcaccgaaatcatccaattccgttcactcgaaaaccgcagacgttttttgcaaccagaggaggtttaaccatgtatttgagccacttattgattgatgtcggcaccaaccccgaccggccacgccccggccgactttggctgcgcaatatttaccatgtgcaccaacgcctgagcatggccttccccaccactcagcggaaaaccaacgacccccacttcttgaaaccctacaacccggccgattttcccctgcacaaccttggcaaccatgtttcccgcaacgaaaacaccggatttctcttccgcattgaccccgtgccggggggcaatcccctgatcatcgttcaatccagcctcaaacccaattgggactacgccttcaacaatgcggcattccttctggcagcccctccccaatgcagggacttcctgcccaatttcaacaaaggcgatcacctgcgcttccgcatcctcatcaaccttagcaaaaaagccaggacaagccatgacggcacccctctcaccaaagtcaaagaaaacatcctcgataaccaaaaccgccctaaatcccagtccaaacgtgtcgcgctgacatgggatgcaaaccaaaatccacaagatgtcatcattccttggttttcccgcaaggcatacgtcacatgccaaaaccaaacccaacccatccaggcatttcatctcaagcaatgtgaaatcctgcgcatgggttggattatcggatggaaaaaccaccatgcagccccggaaccgacctcacaaaaaatgaaattccgctctgcccttttggagggagtcttggaagtttcccatcctcaagccttcgccaaactagtagcctcaggcatcggctcggccaaagcattcggttttggtttgctctcgctctccccggtttcctccgctcaatgaaactggacgacctccatatcctccccaaattctccgatggttggagctacctctatgtcgagcattgtcgcgtcgaacgagaacaaaacgccatcgccatctatgacacagatggcatgatccccgtcccttgcgccaacctggctctcttgatgcttggcccgggcacctccatctcccatgcagccataacagttctggcggaccacggctgtttaatcatctggtgcggagaacaaggcgtccgcttctacgccaccggtatgggtgaaacccgcaatgccgcccgcctcctccatcaagccttcatgtggagccacgaaaacctccgtttcgaagtcgtccgccgtctctacgcaatgcgttttacagaaaccctgccatccaacctgtcattatctcaaatccgcggactcgaaggccgccgcgtccgcctggcctatgacaaagcggcccgtgccagcggcatcccctggaaaggccgccagtatgaccgccatcattggacccactccgaccccgtcaaccgtgccctttccaccgccaattcctgcctctacggcctctgtcactccgctattgtctcctcaggtttctcccccgccataggctttatccatactggcaaaatgctctccttcgtctatgatatcgccgacctctacaaaaccgaaatcacagtccccatagctttccaagcggccgcccaaggagacaccaacctcgaacgccgtgtccgcatctcatgccgtgacgcctttgccgaatctcacctcttggcccgtattatccctgacattcaaaaagctcttgcttggcaaccatcccaaaacgaaaactccccccttgattcagaccccgcccttccctctcacctttgggacccggatttaggggccgtgcaaggcggaatccaacaacctgccacatcccctttgcccccaactataccagccccagccccggaatctcatgatggtgctaatccttgaatcagtcccaccttcactgcgtggagaactcacccgctggctcttggaactcaaagcgggtgtcttcgtcggccgcgtctccgccctcgtccgtgagcgcctttggaataaatcctgccaccacgcccgcaatggcggctgcctcctcatctaccacaccaataacgaacaaggctttaacatcctctcctatggtaatacatccagaactatcgccaacttcgatggactcctcctcgtcaaaatcccaaaataaccccattttccaagggttttccccacgcacgtgggggtgaaccgcgtggtgcgaggtgaacaagaagatgccaagcgttttccccacgcacgtgggggtgaaccggccgtcacctgcccctcccgatccgtccccacgttttccccacgcacgtgggggtgaaccgcggcaggtggtgaagagttcggcgaagtttgcgttttccccacgcacgtgggggtgaaccgtccacccccatcaccagccgccgccccgccgcgttttccccacgcacgtgggggtgaaccgcttccgaagttctcacggacgaagctcaggcagttttccccacgcacgtgggggtgaaccgggcatatttacggtttcacaatgaaccaactcgttttccccacgcacgtgggggtgaaccggccgctttcgaggagctgacgcggctgaagaagttttccccacgcacgtgggggtgaaccggtggcgcgccggtcaatgcagtgccatcttcagttttccccacgcacgtgggggtgaaccggggacagaatatattgtcgagccgctcaacctgttttccccacgcacgtgggggtgaaccgtccctgaccgccatgaactccacgcccgcgccgttttccccacgcacgtgggggtgaaccgccattttgatcaaattccctgcacctcaatccgttttccccacgcacgtgggggtgaacctgaggttgaggccatccgccggcgctcgaaagcgttttccccacgcacgtgggggtgaaccgatttcgctgcggctatcggcctgaacctcaaggttttccccacgcacgtgggggtgaaccgaacctggccatcgagaagaacctggccatcgagttttccccacgcacgtgggggtgaaccgtagtctggccacagcatttcttagagacaactgttttccccacgcacgtgggggtgaaccgtcgatatagccgggttttccagcttcgagggagttttccccacgcacgtgggggtgaaccggcatcgcgctttgatttcgaggaaaaatacgagttttccccacgcacgtgggggtgaaccgcctgtgcgccggtctcggtctgaagttaatacgttttccccacgcacgtgggggtgaaccgttagtcgttgtctcaccgccaccgctcgcgctgttttccccacgcacgtgggggtgaaccggcctcattcccggttggcttaaaaacggtgaagttttccccacgcacgtgggggtgaaccgtgacttggagccaccaacacacaagccagcgcgttttccccacgcacgtgggggtgaaccgacgattgcaacagcggcgttttcggacgcttcgttttccccacgcacgtgggggtgaaccgtggaggtctgaggatggcgagcacgttgggccgttttccccacgcacgtgggggtgaaccgattgttgaaaaccagagccggagcattaatacgttttccccacgcacgtgggggtgaaccggatgtactcggtgccggcgatcgaaaacgggcgttttccccacgcacgtgggggtgaaccgtccaaaccgataagaacatgaagaaacacgaagttttccccacgcacgtgggggtgaaccacgcagcgcggcgacatagtggtgttcaatggcgttttccccacgcacgtgggggtgaaccgcaatgaggtccgagggctggtcatcaacaagagttttccccacgcacgtgggggtgaaccggtcattggcactcttgaccggcgtggccacacgttttccccacgcacgtgggggtgaaccgctttccaggcaccacatcaacaattccccgaagttttccccacgcacgtgggggtgaaccggaactggtggaaatctctacgttgcgcttagtgttttccccacgcacgtgggggtgaaccggcaagcctgacgccaccaccaccgccgacggggttttccccacgcacgtgggggtgaaccgcgccgccatggccggtcatctggccggccaaagttttccccacgcacgtgggggtgaaccgtgtgatccgcaggcgccggccccaacggcggtgttttccccacgcacgtgggggtgaaccgtgatgcccgcggccgcgggcaatgcagtggccgttttccccacgcacgtgggggtgaaccggtccagccggctttgcgcggggccggcgaggggttttccccacgcacgtgggggtgaaccggttgccagacaatgttgacgtagccacatacagttttccccacgcacgtgggggtgaaccgtttgttccagtgaaataccagccaccgtcactgttttccccacgcacgtgggggtgaaccggcggcgatggagctggcgcgggttgaggcggagttttccccacgcacgtgggggtgaaccggtctgcgccagaaccactagctcctaaaatatgttttccccacgcacgtgggggtgaaccagttagttccgcggcccccgtgttcgagacgcgtgttttccccacgcacgtgggggtgaaccgctatgctggccaatgtaggtatgatgagtgatgttttccccacgcacgtgggggtgaaccgtttgtttaactctttagaagaaaccgaaatgttttccccacgcacgtgggggtgaaccgaaaccgaaatggaacgcattctgcttgaacacgttttccccacgcacgtgggggtgaaccgaggtcgaagcggagcaaaaacgggccgctgaagttttccccacgcacgtgggggtgaaccgaaaattattctctgacgtcatcatattctgaagttttccccacgcacgtgggggtgaaccgtttgagtcggactgatgtggtggcggacagtggttttccccacgcacgtgggggtgaaccgttttggatcatccggcgagtaaagaagttttcgttttccccacgcacgtgggggtgaaccgccaccacctccacgatggtgcaggttggaaaagttttccccacgcacgtgggggtgaaccgagggcggcggcattgccgcacgccacgagtgcgttttccccacgcacgtgggggtgaaccggcataaccacgagcccactcttcaaacttttcgttttccccacgcacgtgggggtgaaccgatcgtccagctttttgaagaagcggacgagatgttttccccacgcacgtgggggtgaaccgaaacggctttcgccgcaacgaccacaatctaggttttccccacgcacgtgggggtgaaccgctggtggacacgacccgcaaggaacgcaacgcgttttccccacgcacgtgggggtgaaccgataccacactgtctgccgacgaagccgcccgggttttccccacgcacgtgggggtgaaccgcagattgcggtgtggttcagccgtcaccaaccgttttccccacgcacgtgggggtgaaccgtttcatggcaccgaagaccacgatgtggacaagttttccccacgcacgtgggggtgaaccgaagggctggcgtgccggtaagtaacatcatcagttttccccacgcacgtgggggtgaaccgatggaaccgtagccacggagtttgagtttgttgttttccccacgcacgtgggggtgaaccgggcaggcggacagattgccacgcctcgcgacagttttccccacgcacgtgggggtgaaccgttgttcggcccagcgctccggcagcatccggtgttttccccacgcacgtgggggtgaaccgctcggtttcacgtgcttgtcgttcacgcaaaagttttccccacgcacgtgggggtgaaccgcggtactgacgggctggtctcacgcccaagccgttttccccacgcacgtgggggtgaaccgaattgcgtataatccggaaaataacacacggagttttccccacgcacgtgggggtgaaccgaagcggaggccaaggcattggctgaagctgaagttttccccacgcacgtgggggtgaaccgagacggcttttcagccgcaacgaccacaatctgttttccccacgcacgtgggggtgaaccgatgcaatctcggctgctacgaagcgtggcacggttttccccacgcacgtgggggtgaaccagggggcaccttgaaaaggttgacatctgtggcgttttccccacgcacgtgggggtgaaccagtagtcgcctagttggattcgttgccgaatccagttttccccacgcacgtgggggtgaaccgctggtggacacgacccgcaaggaacgcaacgcgttttccccacgcacgtgggggtgaaccggcgcacataaagtgcgccaatgaacgcaagaggttttccccacgcacgtgggggtgaaccgctctttgccacagcgcttgcggccagggcagggttttccccacgcacgtgggggtgaaccgaaggaaacagcttccaaaatgccatccttgcggttttccccacgcacgtgggggtgaaccgtcttatgccagacccagacaacagccacgaaagttttccccacgcacgtgggggtgaaccgaaaagcgcggcgccgtattgttctcctgccttgttttccccacgcacgtgggggtgaaccgactcaaccaccagcccaaacactacccacgccgttttccccacgcacgtgggggtgaaccgaaacagccttttggctgcaacgattgaaagttgttttccccacgcacgtgggggtgaaccgaaagcatttgtctcgtatgttgttatttggtggttttccccacgcacgtgggggtgaaccggcaagcacggatgtacagtcggctgtggccaagttttccccacgcacgtgggggtgaaccggcgatggcggttcggtcggacagagttgctgcgttttccccacgcacgtgggggtgaaccgtgtacatcttcacacttgcatgtcattgccaggttttccccacgcacgtgggggtgaaccgtctgtccacacattgcccattgcagtgtggatgttttccccacgcacgtgggggtgaaccgtggacgtagctgcggcaaaaaccgcagacggtgttttccccacgcacgtgggggtgaaccaggttgacacgaccccggtcacgttgccgccgttgttttccccacgcacgtgggggtgaaccgtttatttttcacggttcggaaacatatagcttgttttccccacgcacgtgggggtgaaccgcttgccgggttggaacgtcgcgaagccggtaagttttccccacgcacgtgggggtgaagcgctttgtgtctttgtgcctttgtggtttctcctggtttccacgcatgcaagggtgaaccaattcgcgttcatccgcgttcatccgtggttccgatttccccacgcgcaggtgtgaaccgttccccccaaaatttcatcctgaaaatcagctccagcgtatttctttcttggcagcccaagttttgcggggcatacacactctcaacgacacacaacccatgaacttttacgatgtcatcaaagtccgccgcagcgtgcggatgtaccatcccacacccgtcagtcccgacaaattggaacgcatctgggaagcagtccgctgggcgccctcagcctgcaacttgcagccttggcgttttttaattgttaaaagcgatgccatgcgcgcccgcgtcagccggtacctgcaaccgtgggtcatgaccgcaccactcatcatcgtcggcctgggccatcgcaaactgggctggcgccgcgacggccaaagttaccacgaagtggacgtggccatcgctttcgagcatctcgtcctggccgcagcagccgagggcctcggcacctgctggatttgcgccttcgaccgtcaaggcatgcgcctggccctcaacctcgacgaagactgggaccccgtggcggtaacgcccctgggctaccccaacgacccttcgccccggccgccgcgcaaaaccatcgcggacatcgtaggcgaagtgtagcctccgtttccaatgcggcccgaacaccttgacctcctggcctgcccgcaatgccggagcgatttgcgcctccacccggatgcccttatcgcagacggccgcgtggaaactggccgcctcgaatgcacccgctgccatcaacactttcccatccagcgcttcatcccgcgtttcgtcccctcggaaaattacgccgccggtttcggcttcgaatggctccaacacgcccgcactcaatacgacagctacaccggcgtgcccgtgagcgaaaaaagattcttcgaggaaacccgctggccccgccaactgcacggcgagcgcattttggaagtcggctgcggctccggccgtttcaccgagcaggccgcgcgcaccggcgccatgattgtttccattgactacagcgtggcggtggaagcctgttacgcctccaacggtcacctgcccaatgtcttggtcgctcagggtgacatctaccgcctgcccgtgcgccatgacttctttgaccgcctcttctgcttcggcgttttgcaacacacaccccgccccgcagaagccttcctcgccctcccgcctcatctcaaacccggcggctggctcgccgtggacgtgtacaaacgcaacgacacactccgcggccacatcggcaaactttttggcaccaaatacttcgtccgccccctcacccgccgcatggcccccgagcgcctctaccgctgcgtcaacacctacgtccgcaccatgtggcccctcgcccgcctcatccaccgcatcccaaaaatcggccgctggctcaactggcgcctcttgatcgcagactaccgcgacgtctatcccctctccgaaaaacacctcctcgaatgggccatcctcgacaccttcgacatgctctcgccccgctacgacttcccccaaacactcgaaaccgtccgccaatggttcgcccaggccggcttgattgaagtggacgtccacttcggctacaacggcatcgaaggccgcggacgccgtcccctttcctaattccccaccggcccacccctcgcccccgcttcaacgctccccatccacatccaacgccccaatcgccagcggcccctccgcactgcgccgccgcaacttgaacgtctccctgtccgcctcccgtgccggctcaaacaacggccgcggcaaccctgtgtccgccacccccgcccgcctcaccaacgcactctcccgcagcggacgccaatcccccctcaccgcccccgcaaacccaggctcccgccccgtcaacgtctgcttccaaccccgcggcaaatgcgttgaccccgccggcacccaattaaacgcccccgcagactcatacctcaacccgggatcatacaacatccgcaacggcctgcccccgccgtaaaacacacaataataaacctccaacccctccaaaacatcctgcaacttgaacacacccgcccgccccgcctccgcgctcaacacaaaagtattgtgcacaaactgcgcccgcccccggctcgtcccgctcccatcgccccccaccctcaccgccgaaactgccaccccgcccgacttataaaacacattccccaccaccaccgcatcacaccgcacccccgccccaccttccccggcccgcccatgcctgtccggccccaacaactccagctcccgcccccacgccccctccacccaattataaaaaagctccgtccgccgcgccctcgacttgatgttgttcccaccgcgcccgtccaacacatgacaaaactccatccgaaacaccccctccggatgcttctgcacatccatcccaatatacacttgatgaaacgcctccccctgcccgcaacgcgccacagtcacccggctcaacgtcaacgaccccgccgcatccgaattcaaaaccccgagccccgccacatcatacaccgccacacgccgcaacacactcccatgccccacattcctcaccccccgcgtcgcattcgtgtcccccccgcccgtgatctccaaatcctccaacacataataatccccgctcacccgcaccaccgccgcctcacgcccctgcaccccggaaatcactggccgccgcccccccaccggcacgccccggatcacgatcggctgctccgccgtcccgctcacatccaaccgcacatcccccggataaatcgcgccccccatcacctccaccacatcccccggccgcaacaacggcgccacactctgcagcctcacatgctcccgcccaggccccacctcatacaccgcggcccccaggctcaccgccgccgcaacaaacagcccaccacaaaaaatctgaacaaaacgcaccacccgcccacctcatcgcaaatccaacaccccaaaaaacacatcatccggcaacgcactgaacaccgccgtcgccacctgcggattcccccgcgccgcctccacaaaatccatcatcggctccaaccgccgactgtaattgtacgccagcaccacacccccggccctgaccttccccggatacaacttccgccaataatccaaattccccgacttgtccgcattcaaaaaaacaaaatcaaacctccgcctcaaccccgccaccaacacatgcgcatccccctccaaactcgtcacacgccccgccaccccaagcctctcaagatgcctcaccgccttcgcccgccgctccggcacaatctcaatcgtcgtcacacgccccccacgcgcctgcgccgccagcgccagctcgtacgtcaaataaccgtgcgccgtcccaatctccaaaacctcccgcgccccccgcaacctggccagccaatacaccagcgcacgctcctccccaggcacacgaaacatgctctcatcctccgcctcaagctccgccaacaccttgtcctgcgccgtgcgcctttgcgccgcaacctccgcgcccgccgcatcccccggactcatcccccacaccccacacaccgccgccaacaccgtggcacgcccgagaaaatcccggcgccccgtcgctccgccctcaaaaacatttgcattcataaaaacatcccacatcctttcaccccccaatataaccccaccacccccacctgacgacaccattaccacaccccccgccatcgtaaaaattctaaaccttcacattcggatgacctcttgttacattttctacaaagatgtcaaacgcaaccaacactccctcctctttgcgagcttggtacggggcccccattaaagcatttcttgcttccgactcccaaaagattctaggagaaatcacctccaactgtgatcgcacattaatttcaacacaacgagacgcctggcttgcggaaatcgaaatcctcagaaaccaactccaaggacttgagggggccatcttctttgaattcaacatacctcgcatggggcgtcgagtggattcaattctcgtgattggtcctgttatctttgttttggaattcaaagtcggtgagcgcaactttgaccccgccgccattgaacaagtttgggactatgcgcttgacctaaaaaatttccatgagggaagtcacgatgtctttatcgctccgattttaatagcaacagaagccgcctctcccgcccattttgaatatgtgcacgaccctgacaaagtctttcgccctctcttgactaacgcatcatccctccgtcttgcaatagacaccggacttaaagctgctaatggaactcccatagacgtggagacatggtcacgagcttcatataagcccacaccgactatcatcgaagcagcacgagccctttacgcccaacactccgtcgaggctatcgctcgttttgatgccaccgctcaaaacctgcacaccacttcaaatcgcattgaagcacttgtggacgaagcccaaaccaaaaagcaaaaatatatttgctttgtcacaggtgtcccaggcgcaggaaaaaccttagttggcttaaacattgcaacacagcgccgagccactgaccaacctactcatgcagtctttctttcgggtaatggacctcttgtcgcagtacttcgcgaggcccttacacgcgatgaattagcgcggagaaaaaaagaaggtaataaagtcaggaaaggcaaaattgccgaaagcgtcaaagcctttattcaaaatgttcaccactttcgagatgaaggactcattgcgtccaaaccgccccctgagcacgtggtgatctttgacgaagctcagcgtgcgtggaatctaaggcaaactgctaacttcatgaagcgtagaaaaaatcgtcttggcttcgctcaatccgaaccggaatttctaatttcatacctagatcgccacaaagattgggcggtcatcgtctgcctagttggcggagggcaggaaattaatacaggcgaagccggcattgaagcttggttgtatgccgtccataattctttcaaacattggaaaatgtttatttccccacgacttaccgattctgaatatgcggcaggacgggcattggaaatcatccagcagggcaacaattatcatttcgatgattccttgcacctcgcagtctccatgcgctcattccgcaatgaaaatgtctcggcctttgttaaagccctactggattgcgaaaaacaaaaagcgcaggaaatctatcgacaagtaaatagttgttacccaattgttttaactcgagatttaaccgccgctaaaaattggattcgtacacgtgccagaggttcggagcgctacggtttggttgcctcctctaaggctatgcgtcttaaaccccacgcaattgatattcgagtcgctgtaaatcctatccattacttcctcaacgaacgagatgacactcggtcaagttattacctggaggacgccgcaaccgaattccaagtgcaaggattagaactcgactgggtctgcgtcgcttgggatgccgatttgagacactcatccaccggatggaattattatgatttccgtggtaaacgttggtgcaatataaacaatcaggagaaccgcacttatttacgaaatgcctaccgagtactactcacccgcgcccgccaaggcatggttatttttattccaaaaggcagcactcatgatcctacccgcttacccgcctattatgactcaacctataattacctaaaaagtctaggcgtccctgaagtcatctaaagcacatcctcatttacactattcatgcatcaactccacggcacagttcagaggtcgttataccaagagccttcgccagcttggcgacgtttttaatccccggattacgcaagccacgctcgattccactgatgtaagtcggatccaaccccgccaattcagccaatttttcctgcgtaagcgatttcacttcgcgctgacgccgaacgtttcgtcccagcgtaacgaggatttcatcgcgttttggcattaccgtcattccacgccatttttcccaaaaaatctatggactatcagtcaagtccccaagtcccgccaaaaccgccaatgctgagccgctttaattcccactccactggggagagaaaaaccaaggtgaggaaaaaccctattttttctctctccttcatggagagggttagggtgagggaaattccgaatctatcccctctcccgttggaagagggccaagggtgaggggcaattcataaaaaacctttgtgtctttgtgtctttgtggtgataaaatccgcgtccatccgcggttcccactcttttgaactccctttactttgaagtcataggtctggggtgaggaaacccaatcactccccctccctccccctcagggggagggccggggtgagggaaacctaattatcccctctccttttaggagagggcaagggtgaggttccttccccaaaaaatcaccgctcccagaacactcccccacctccccctcccaccccatccttcccaccgcatggcacaccgccatccacaaccaaccacacagcacaccgccccggcggccaccgcccccactccaccacccctcgacctctccaacatcccccaactcctccaacaactcctctccgaccccaacctcgatccccacaccctcgcccaagccatcgaacgcctcctcctcgcccaaaccctccaaaccctcgccgaccccaccaccccacccccacaacgcgccgccgccctccaaacctaccaccaatggcgcaccaccgacctccaacgccaacgccttcaaatcgctcgcgaacgcctggaaatctcccgccaacgcctcgaactccagcgccaacgcctcgccacccaacaaccaccccccaccgacacccccgaccctcaagttcccaccgaccccgaagaactcgaccgaatcatcctcgaccagctcgatcaaatcctcggcctcaaaccccgcacccccaaacccatttcccccaaccccgccccgcccccgcctccggctcctccccccgatccccaaaaccctccctaaaaccttcacctccctcctccaccaaagcgcactctgcccaaaaaccacttccgattgagccgccgccaagctctgcagccgggcctaatttttattgagaatgcccgctgcaacccgctatgctcgccagcttatgaatgtgttggtgacaggcggcgccggttacatcggcagtgtgtgtgtggagcaattgttgaatgcgggccatcaggtcacggtgttcgacaacctttccgaaggccatcgccaggcggtggacgagcgggccacgctcgtagtcggcgacttggccgaccgtcaggccatcatggacgccgtcaaccagagccgtcccgcagccatcctgcactttgccgccaacgcactggtgggggaatccatgaccaatccctccaaatacttccgcaacaatgtcgccgcaggcctgaacctcttggacgctgccgtcgccgccggaatcaaaaagttcatcttcagctccacctgcgccacctatggcgtaccagagcgcctgcccatgaccgaggatttgccccaaagaccggtgaacccctacggtgaatccaagctgatgtttgagaaaattctccattggtaccatcagattcacggcttggaatttgcggccttccgctacttcaacgccgcgggtgccagcgagcgtttcggggagcatcaccgcatcgaaacccacctcattcccaacgtgttgaaagtggctctcggacagcgcgaatgttgcgaaatctacggcaccgattaccccactccggacggcacctgcatccgcgattacattcacgtggtggacttggccgacgcccacatcagggcgctggagccgggcaaggccggtttcttcaacctcggcaacggagacggctattccgtccgcgaagtcatccaaacctgcgagcgcattacgggcaagcccatccgggcagtcgaaaaaccccgccgtccgggcgacccaccgcgtttggtggccggtgcggaaaaagcccgccgggaactggggtggtcacctaaatacccacggttggaacaaattgtacactccgcctgggaatggcaccgccgccacccccatggttataccgcttgaaacaaacgggtgaaaatcacgcaaactgagcgaaccggcttcctgcaatgagtttgggcaaatcaacggtcttgacagatgccactaaaaaccggcaaaaaaatcaggcgcaaaaaatctgcctgggatggcatctaaattgctattgcttaaaggattaaagtgccctttccgggcgtccgaaaccttggaaagagccgtccaaagacctcgaaaaactgcaagtccgggtgccaaccggtacaaggatttgaaaaaaagtcttggaaaagttacaattcggtgaaaaataaaagttcgtttggcatatgttagagacgtttttacgcggtgactacgccgcgcagccaatggatttgccagtaatgattctggcattgtgtctggcctttttgggcgggcatgtcatcgcgtggacctacatggccacccactccggcctctcctattcccgcaccttcgtcaacgccatgatcgtcctgccgatgatcgtgacctcggtgatgatggtgctgtccaacaacctggtcaccgccttcggtttgatggccgttttcgccatcgtccgtttccgtaatatcctccgcgacaccttggacaccacctttattctcgccggaatcgtggtgggcatggcctgcggcacgcaccgcttccccgcggcggtcatcacatgcatcatggtgtccattgtgctgctgtatctgaacatgaccatgttcggcgcacgccatcgttacgacatcatcgtcaacttgcattgggcccgctccctcaaggatttgcccgaactgcgccgcttgctggaccgccacagccgcatcactcattgcgccagccagcgcaccagcgaaggctacgaaggcgccgatttaagctaccggcttttgctgcggaacccggaacgcgaacaagacctgctgaccgaactcaaagccatggagggggtctcccgggtaaccagcatgaaggccgaagacgaatctgaaatctagtagaaggaagcacgatgaccgcactacccaaaatcccgagtcccccgtcccactactggcgggagttccggcatggatacctgccgatcattgttttcctgggcgttctggtgttgtccgtcaacctttggaaccgccacatcgcacccccaagcatcgtgggcgaggtggagtccatccgttccaacattaccgccaccgaacccggggaaatcaccgaactcagcgtggacttgctgacccgggtggagcgcggggaccccatcgccaccatcagcgtcatggaagacgaagctgtgcgggcgagcatcaattctatgcaagccgacctgacaattctcgaggagcgcctgcgccaaagcagttaccgcttccaggaaaatttggaaagccttcgccataacctgtggcaacgcaagattgaactggccaacgaccgcgcacaacttgtgtacgccgaagccactttcaaacgcatcgccagtcaagtcaaagacggtgtgaaaagccaggatgaatacgacttggcaaacgccaatgtacaagcattaagaggcaaggtttccgagctggagaccctcatcacaactttggaggaaaatgtgaaacgcttggaaaaacaagccctctcctcccaagacgcggctggcaatgaagcaattgccaaagccattcaagccaagcaggcggaaatcctggccttgtccagccctctcgtcatccgcgcccccatgtccggcgtggtgagcgcagtctataaacgcaagggagaacgagtggtgcgcggtgacgttatagtggtcatcagcaccatggaagccgagcgcatcgtggcgtatgtgcgccagccgttgaacatcaagcccaaagtcggcgatacagtggaagtgcgcagccgctctcaaggccgggccctggcccaggccaaagtaatgaaagtgggaacccaactggagcccatcaatccttccatcctccccatggccgtccaaaacggtgtgatggaatacggcctgcccatgctgattaccctgcctaaaggcctggccctgatgcccggtgaaatcgtggacatcagtctgcctgccggtttccgctaaaaaaaattttttacaatggccgccctcccgggcggccttttgtttttcacgcaaagaccaggccatgcaggttttcaaaccaaaccttctgaccagcctcacaacaaaggcttgagtcagaaacctcggcccggttgaataacgcccatgagagcagtgcaattggtggcccacggaaaaccgggccgttttgaactgcgggacctgcccgatcctcgtcctgccgaaggcgaagtcgtcgtccaggtcatggcctgcgggttgaatcatctggacttgtggctcgaagaaaacggtctgcccatccaaccttcactcccccgcacagccggctgcgaaatttccggccgtgtcatccaaaccggccctggagtcaccgcctggcggccaggggaccgtgtggccattcaatccaacatcttctgcgacgactgtgaattttgccagcgcggcgaggaatccatgtgcctgcgcagtgagctcctgggcatccaacgtgatggtggttttgcggaaaaagttctcgttcctgcgcgcctgttggtggcgctgccggccacggtggatttccccacgtcagccgcactgacattggccggaagcaccgccatgcacatgttgacccagcgcgtctcggtcaaggccggcgattgggtgctggtgatgggcgcagccagcggtgtcggctctgcggccattcaaattgccaaaggcctcggagcgcgcgtcatcaccaccggctccaccgaagccaaacgcaaactgggactccaattgggcgccgattacgccctcgaccccgccgaaccgcgctggacggcggaagtgcgaaaaatcaccaacaaacgcggcgttgattacgtggtggaacacgtgggcggcgacgtgctgcctcgtctgatggaatgtctggcgcgtggaggtgccatcgtgacctgcggcgccaccgccggacgccaaatcacctttgacatctggcccttctttgtgaagcaacaaagtctcatcggaagttatggccgcaatcgcgccgatatgcgtgccaccttggactggaccgccgccggcaaactcaaacccgtcatccatgccatttaccccctggaccgcgtaccggaggcttttgctgctttgcgacaacgccaggtcctcgggaaaattgtaatccaaccctgaaccgtaacatccatcttcgccatgaaaaaactcctcctctggctctccatcagtctgggcttgctctgcgcaaaacttggggccgcagaacccaacacgttgaccgacgccgagcgcgccgacggctggcggttattgttcaacggtaaaaaccttgacggctggcgcggcgtgcgacgccccaaaccgcccaccacaggctgggtcatcaccaatggatggctggtcaaagtcgccggccaacgcgggggtgacctcatcaccacccaacgcttcgacaactttgaactctcctgggaatggcgcatcccgcctcgcgccaataatggcgtgaaatacatgtttttggaggaccgcggcgtgggccacgagtatcagatgattgatgattccattctgagaaaccccaaacagcagacggcttccttttacgacatattgccgccgcgtccccatgcacccgtcaaactagccccggaaatcaaccacagccgcatcattgtccgcggagcacatgtcgagcactggttgaacggagagaaagtcctggaatacgagtgcggcagcccggccgttctggaagccgtggcgaaaagcaaattcaaaaattcgcctgacttcggcaaaaaagtcatcggccacattcttttgaccgatcacaacgacgaggcggctttccgcaatatcaaggtgcgtgaattaccagccccgtagaaggggccggctcttccgccatggccgtggtggacgtcatgccccccgccaaagaacaaagaatcaataacaccgccgctgccagcagcgccagaagggcattccgctcgcgggagtcaaaccaccgcaaggcgccagtccccggaccctccgacatcggtgctgttgatttgttctgacccataaacatccgttaacaataagacggtttttagggcaaaatgttggaaacttttttcaattttttttggaagaaccagatgcacccctcaccgccgcaaccggaaaaagcgtttttccccgcccgcttcattggtccaggcacgccaaccgccgacggctggcggcaaggggataacaggttgccagacttccgaagtcagatggtgggatgtttccaatcccatattatccgcatcctgccagcgtaaaacaaggtggccggattgtctcgagatgaacagtcgcggaggtggtggcacaacatcttcaaaagcagtccccacccacaagcgctccaccatgaccccaccaatattggccgcctgccgaaaagcccaagccacaaccgtgctgctgccggcagtgtcaccggagacgattccagaatcggattccaaagcaggattcacccacaacacacatcgccctgtattgatgtcaaagcgggtcacaacggtatgcagtttttgagtagatagagcatgaggcgtttcagacgttggcagcgcagccgaactgctcaagcccagccggaaatgccccggcggcgcttgattggtggtgacaaacaaccgacaacgaaaaccattacccccatccttgtagtgtgcccaatatgcaggcaccgaattggtcggcaggctcaaaactcggaaatccatgcgcgcatacaatacatatccactgccggaagtaattggggagattggcaatggggcattcacatcctctgagttctccatgcttaatcgcaggctgcctcgctccgcgacagcttgtccagcctggccgctgtgggtctgccatttcgcagatccgacatccaccaacggcccatctgcataatcaaactcctcggtcaacaatcggccgggatgcggagccaccgtcacatggaattgattggtaatacgatgataaccatccgtgatcaccatgctcatgatggcatgtccggcacgatcggctgcagggcgggcagtcaaacggcgttcatattccgtgccggacactacgagatttgtcgcaggaaataaaacgcggtccgacgcactcacggaaatttgtaaggggtcaccttctgcgtcctcaagtcgtatcggccacaaatcaagtgtctgattaacacgaatgatttgatccggaatgctttcgcacttggggaccccaagcctcaccgcaaaggcacgctgggcactgaggccggtatcatccagggcggtgattgtaatacgcgcggtgccttgcaagccttctgaagcttgcaatacaagcgtcctctgtcctgcgactccaccaaaaataaatccttcaggtgggatcaattccggcggctcgcaaacgccataaagataaataaacggcaacggcgtgtcctcgtcggtcaaagttaatgacagtgttggcgtgcgtccccctgcaggcaaatccaagtctggaattgccgagagagttggcggcgctccaaaaggctgcacttcggcaaaagaataccccactcgcaaaccatccaaccaaagctcccccatgccactgctgctggccaaagattgccgcaatgccacggcgtggatggccaatggagctgttccgtccgtgggtatttccaaggctgtgtcttgttcccctgctggattcacccacaaagttgcggcaggcggctgaagttgataacgcatcaccaccacctgttcctgctgtgtggaacaagcttgtggatgatattgtgcgtacaaaggcgatgttacaccggtcaggcgaagtcccaagcgaaactgaccgggcggggcgtccatcgtcgttgcataaacacaggcgcggttgttgttcacgcctgcatcttttaacagcagaaagcacccaccgccgccggagggcaaacgggagaaattaacggtaaacctcacatacaacaccccgctggtgtgcggacgtcccggcaaaaacacctgcacatcctccgtcaacgtttcggacaggcgggcgcggccttgaagcacttgaagttgattggatgtgccgctgtagttggaccatgtgtccggcgccagttgcaccagcggaccatcgtcgtagggaaaagtttcgtgcaacaacaaggccgctggaagctgtggcacaccgcccatcccaaagaaaaggacaaggtgccaccaagcccaaaaggatcgaagaagtcggaaagaattgaaaagcgatggatgcgagtgtcggtctgtgtgcatgaacgcccgttggacgcagcgtcaatacacaacagttcccatgctgacaagcctcctttgcaatgagatcagtacgggcgtcattggcaaacaacagaaatagagcaagtcctcagcccccgatggctgtcatgggacggcacggagtgaatccttgcaggaaggagtgagccaagggtttgcgggccatggcctcgcggaaaaattcttccagctctgcatcacttgctcctctgcgcaataaagctcccaaatccaattccccatgatcccccaggcatggccgtatttttccgtccgcagtcaggcgcattttattgcagtgctcgcagaaatggggcgtggtcagcgcaccgatgaatcccaccaaggcacccgtgcggcggagccggtaatatttggccggcccccaaccaagtcgggggttgggcacgggcgtcatctcatcatgttggcccaacaatttcatggcctctccgatgctaaagaagttacgctcgtccaagacatcgctcgaagtgaccggcatcaattcaatcaaacgcagcggcaatccaagctcggcggcgaaaagcgtcaacggccatatttccttttcattaacccctcgcattaaaacacaattcaacttgatgcgttcaaacccacactgcaccgccgcttgaatcccgtccagcacccgctccaattggccgccggtgattttgcggtaaagctccggattcagagcgtccaggctgatgttgacagtgcgcaaacccgcatcacgcaatggcggggccagcgcggccaaacgcaaaccattggtggaaaggcccacacagtgcacccccggcatggccgccagttcacgagtgatttccaccacatcatcccgcaccagcggctcaccgcccgtcaggcggaatttcctgaagccgagccgtacggccacgcgggcgacacggacaatctcctcccgtgtcaaatggtccggccgggtgcgccagccgcggtatccctccggcatgcaataaaggcaacgctcattgcaccgatccgtgatggacaatcgcaggtaatctatggtgcggccaaaggcgtccatggtttaatgtgtttggtgagggtcccgtccctgcaaatgctccacggcctctatgatggcctcacacaaaaagcccaaacattcggccactgcacgtggtttgccgggcaggttgatgatcaaggtggtgccgcgtgtgccggccacggcacgcgaaagaatggcagtcctcaccttttgaaacgattgcatgcgcatcacttccccgaagcccggcaattctttgtccaagacccgccgcgtggcctctggagtaacatcccgtgcagtgatgccggtgccgccggtggtcaccaccaattcacatttttcttcatccgccaacctgcacaacgcgccggcaatggcctcctgttcatccggcaccaccatcgcaacgaaggtttggtccggccccaaaaattcctttaacacccgttcaatttcagggccgctgacatcgtcatagactccgctggcggctctgtcgcttatggtgaggcgtccgattttcatggaatgtcccttccccatcatccaccggacaccggcggaatgagggccacctcatcaccgggatgaaacaatgcctcaggcgttgcatactccccgttgcgcgccagtcggacggtcgcccgatggggcgtgagggcggggtgttctttcaacaaacgctcccacagctcagcagccgtcatgacgcccccaatcggccattggatttccccgcagcctgcggcatctttcagttgagcaaaaagcagtatgcgcataacgctcttgaggtgccggagacagcgcctcgatagtggacgttattactttaagctgttctaaaccttgacttcaggcaaggttttttaacggcgggcaaaccaacggcgtcgttgcaaatgctgtactccattctcaggtcaccggttcaagcgtgccatgacggacctgccagcgatgcaatgtgcggcttaattcccgcggccaattttcttccgtgcacgtcatgaagacctgtccgcgggcctgacggctgcgttcgagcaagggaagaaaagcagtgcgccttttcaaatccagttctcccatgacgtcatcaatcaacaaaatcgggggtgcccccaacaccgaggtcaaatactcggcttgggccatcttcaatgccagcgccaaagtgcgtttttgcccctcactggcatattgcgaggccggtttgccattcaatcgaagttccacctcgtcccgatgtggtcccacaagcgtcaaacgggtggcccgctcctgttcacgcgagcgttccagcgcacgcgccaaatcaagctcgccagtggagggttgataagccatttgcaattgttcatcagcaggagcaacccttgcatgagcggcacagaccagcggagcaatgcgagggatgagttcctgacgcaaacgcatgatctcagtaccggccgccaccacctcgcggctgaaacctgccagtgccgtttcatcccagtgccgtgcccgcaacaaggcattgcgggcgcgaacggcgcgagtataacgctgcaataatggcaggtaggggggatgcgtttgtgccagcagcaaatccatgaaccgccgccgcacgcggcctggtcccttgacaagctgaacgtcctcactgcaaaagacaacagcccgacaggtgccatagtaatccatgagccggcgcacgggctggccatccagcagcaacttgcgctggcgcggggaccaaaacattttcacctcgtgccgtaacgtgcccaccacggtggcgcccacccaatagcctcgtgcaccgtgccggatgagctgcgccccgccgacaccgcggaatgaccgcaacgtggcaatgaggtagatggcctccagaaggttggtcttcccttgggcgttgtctcccaagatcagatgaaaacccggcgtgaacgccgcgtccaatcgggcgtagttccgaaagtcccgcaatctcagccgggccagatgcacgggacaaggttagaaggctgcaggccgggcggcgagcaattttggaggagcccaagatgctttcttgagctgctgcacattgaaaaacggacatgaaaccggcgctattggggattcacggctggacaaggcccgatgatggggtacgtttgtttgaatgatggtgttaccgaaacccgaggtcatcctgacgcatgaaagtgacctcgatggcctgatggccggtgtgttgttgcaacggctcgcccgcaagctctttgggggttatgtgcccctggaggcatgtcactataacatctggcgaaaccgggacttgcgtgaacgttcggcctgggtggcagattttgcctttgaacctcggctggatcgcgccaactggttgcttgtggatcatcatccctgcgaagcacagcccaagcatttgatgttcatccacgacaccaccaaatcagccggacgcctctgctacgaattatgctgcgagcatggcatggcctccccggaattggagcggctggcgcatttgaacgacgtggctgatttatttctggaagatgaccccgattttgtggcggcctgcgacgtggccaacctcgtcaaggtgtatggtttttggaatctgcacgcgctggtggagggccgcattgaagcccttctaaaccatccattgctcgaggtcatggcggtcaagcgccggatcgaggacccgctcggctacgaatggagcaaagagcacatcatcccgctgggcgcaaaaatcggtctggtcgaaaccgtcatcgggaataacaacgcgatcatctatcaactgctggagagcaaggccaccccttatgaagtgttggtcaccttgttccgcaaaagcaacggcgtaatgattgccagtttccgcagtcaaaatggccaagccctcaaggccgccgagcgcgtgcaaggtggaggtcaccccaatgccgccggagccattctgccgcggcatgtgcgcaatctggccgatgccgtcacttatctcaccggtatcttcaaccctgctcctgcaaaaggttctcccctgaacagtttggaggcgctttttgccgaccttgataccaagccataaacagcacggattcggcagcaggattcacaaacacattggccccgaggcgtgcctggactcacggcctcggcacgccggtgtccgttgacactggcgccgcggcaggctggttgattgtggccgctttcaagtcctcacgcagcatgtccaactgatccagttgcaatttggtgcggcgcgccagtgtgcgtggattgtcgctcatcaaagcctggccatccgccgcaaaaatcgcccgctcgcgccggctgagatatgtttggagcactcgcaggtaatcctcggtgaggcgcaataatggcggtgccacgcgggtacgcagcagttggagttggccgattttttggcgcaccatcgggcgttggcgccccaagtcccattgttcaatcaccgtttgaaggctcacgctttgccttgcgagacgcccatcctcagttttgatttgcacgggacaggcgaggatttcttccagcttacgccagctttcagccacggaataaaggttggcttggtcccggcccgtgagggtggtgatttgaagattccaccatttgtccacatcccgcatgtttttgaagtggccggcaaaagcctgaaggaaacccatctgccagttgagatgacgggcagcgtgatcctgcaaaaaacgccgcaagcacgccgggccgtccggcaaccgcaagaggctccagacaaaaaaatgcgagcaatgatcataatatccccccggcggctcacccaacaaaacggttgaaggccagttcatttcatccagcggcatcggctcgcgcccatccaaccgctgccggatgacggccaaggggtccacgcgccgctcgacgcgtatcaccgccgcgtcccgccgcccgggttccacagtcactcgcaagctggagccgtatcgcagctccaataactcggccatgccgcggctcaaccacggcggaagttccgctggacgcgcccccgcctggcggtcggccatttcctgcaacaacaccgccaccaatgcccggttgagccgtgtgggttccacctcgcttggaacatggatttgataaaaccagccttgcggggtgtattgggctttgacggccacaggctctcccaagtctgccgcgcggtaaaggttgatatagatgcgccccttccaaccgtcggcgctttgcaattcgcgcaaaagggcctgtttcacgcgctccgcccaaacggccaactgggcctgtgtgaccaaaacaaagttggtgcgccgctcatcattgatgtaggccggcgagggcagaatctctggcggcccttgcaccacccattgccgggactggctttccaccgataacaacttgggaagccctggagccggcgcagcccccaccgtggcccacgcgcaaaaaagtattggcaaaagcacgctggacaaccagccggtggagcgaaggcgcatgcgtggctcaagtttttttggcgctgcccccaccggcgccgttgccgcttcccgagccattcgagccgcctccggtgctggaacttgaactcgaactggacgaagcagtggacgccggagccgcctccttcttggcggcggccttgtagctttcgctgcggtaatcggtgatataaaaaccattccctttgaacaggagtcctgcaccggtgccgagcatccggcgaactttgcctttgccccaccgcttttggggacaccggtctttgggacaaaccgtcaaaggttcgtctttcatgctttgaaagacttcaaactgatgttggcatttctcacaaacgtattcgtacgtcggcatagatcattcccttcatcaaccagagccgtattctatagagcaaagccggcacaagggccaagagataaatcatgggtgccttttgcttgaaaaggaatggggatggtgtcagcctccaaggtctgaggtatgcgcggcggtatcggcagcgcaaccccctgataccctatggaatatcgcgcctggtttcaatgcatcaacgagggatgtggcgccacctatcccttgaaccaaatcatttaccgttgcgagcggtgccaatcgctgctggaggtacggcatgaccttgaggccctgcgcttgcgcagcgcggcggcctggatgaaactttttgacgaccgctaccgcagcaatcagtggccctacggctcgggcatctggggcaaaaaggaatgggtgctgccgggcatcaaagatgaaaacatcgtttctctttacgaaggctgcaccaatcttttttgggcggagcggctggggcggttgcttgggttgagcgagctctgggtgaagttgtgcggcaacacccacagcggctcattcaaggacctcggcatgacggtcttggtgtcgcaggtcaaacaaatgatcagcgaaggggcccccatcaaggccgttgcctgcgcctccaccggcgatacatcggctgccttggccacttactgcgctgctgcaggcatccaatccattgttctgctccccaaaggcaaaatttccaccgcgcagttggtgcagccgattgccaacggggcgttggtgctctcattggacaccgactttgacggttgcatgaaggtggtgcaggagatcaccaaagacccgaacatctacctggccaactccatgaacagccttcgcgtggagggccagaaaaccgtgggcatcgaaatcgtgcaacaattcgattgggaggtccccgatgtctttatcattccgggaggcaatttgggcaatgtctccgccctgggcagcggtctgttgatgatgcgtgacttgggattaatctcccgcctgccgcggattgttgtggcgcaggcccaaaaggccaatcccctgtaccgctcctttcagaaaggctttgccgagttcacgccgatccaagcggagcagaccctcgccagcgccatccaaatcggcaatccggtcagcgttcaaaaggccatccgcgtgctcaagcaatttgacggcgtggtggaggaagcctcggaagaagagctggccgacgccgcggcgcttggagaccggaccggcatgtttaactgcccccacacaggggtggcgttggcggccctgatcaagttggtgaagcgtggtatcatccaaaagcagcatcgggtggtggtcatcagcaccgcccacgggctcaagttcaccgacttcaaagtgcgctaccacgaaaaatcgctcaactttccgtgtcagcacgccaatccgcccatcgagctgccaccgagcgtggacgccgtgaaggcggcgctggacaaggcgctgcgtgagcgcgtggtttagcaccaagacagcgagctagcgtccgctgcgggcctcctgccagatggccttgatggtatcctcttgattgaacccttgaggataatggcgctgcatgttggcgtaataccaataacgtttgccttggggcgtatccacggggtcatgcaacacgcggctaccaggcatctgcaaccaaccgtttggatcggtgtcccggacccatttccaggcgtagcgcagccattcattccggtactcctccggctggcgggcaaaccatgagatttcatcgtatccccatgtccaataggacaggccgggggtgccgcccttgccgctgctcccccagttgtcgaactccaccaaatacggcaggctttcgcagcgccaacccgccggcgtgatgcctccgcgactgcgcccaaacaaactgtccagataccccttctccaacacgcctttttgtggctggcctgccacttctttgatgcgtagtggaaatgagtggaaatcgaacaacaaatgttctccgcggcgggggcctccatcgggcgtgtgggcgtcgcataaaacccagtgacggcgggcatggcgggcggcgtattgacgaacgcggctgagcatgtcccaccatgcctcccaattcttgtcattgcgtccgatgagcgccacctgcccgaaatgaatggcctccatgcctgcgctgatgtacgtggtggccacatggtaaaaccacattcgcgtttccagctttgtcatgtctgggacgctggagtcgcggccccaatgattgtgaaacacccctttgtcaaacaacatggcgtcatagcggaaatggcgcgattccaccggcaatccaaacgccgcaaatacctcgggcgggatgggcaccgtctccacctgtcgcgtgacgatttcgaagacgcatccctgcaaaatgatgtccggcatcacttgatgcgtgcggctggcaatttgccgggcgcgctggacacgattggaaaactggttttcacgtccccacatgtagagtgttcgtccggcaaatcgcgccccgatgttttgcaacatgcgcaggttgtcctccggattgccctgtccggtacaataatccatcatggtgatggcgcggcttaaataacgctccagtaccggccgcgacatcggaccgtcaaaggccagttcgttggtggctcccaccaaagaggacgccagcgccatcagaatgccgaaaatcccaatgcgtttcatgcattcacagtcttgctctccccaaccactgtcaagcttggtgtgactgctgcagccgctgccattttgtatcatggcattgccggaaacatatcgcctcgttattctacgccgccatgagcgacttccagaaagcggacggcatgatgtacgcgcccaagggcaaaccgaatgtggtatgtgcgccgggtgaatttcgctttgcggccatcgggcttgaccatggtcacatttatggaatgtgcaacgggctgctggaggcgggtggcagcctcgtcgcagtgtttgatccggactcagaaaaaatcaaacgcttctgccaaacctaccccgacgtacgggtggccgcttcggaaacggaggttttggaggatccttccctgcaattaatcgccgccgcgcccatcccgtgcgagcgcaccccgttggggttgcgggtcatggatcacggcaaggattatttcgccgacaaaccggccttcaccactttggagcaactcgccgcagcgcggcagaaaacaaaacaaactggacgcatttttgccgtctattacgccgagcgccttcattgcgaagccgccatctacgccggccaattgattcaagaagggcgcattggccgagttctgcacgtggccggttttggcccgcaccgtctcaacgctccgacacgtcctccctggtttttcgaccgacacaaaactggtggaattctctgcgatgtcggcagccatcaattcgaacaattcctggccttcgcgggcgtgcgcagtgcgcgcattcttcacagcaaggtcaccaactacctggccgacaaatacccggactttgaagattttggagacgccaccgcgctggccgacaacggcgccacgttctactgccgggtagattggtatacgcccgatgggcttggcgcatggggcgatggacgcaccttcatcatcggcacacgcggaaccattgagttgcgcaaatacctcgacgtagcccgcgaacggaccagcgaccatgtttatttggtggatgcacaaggtgagcaccacctgcccgtccaaggacaggtggggtttccttatttcggagcgctcatccgtgactgtctggaccgcaccgaaaccgcgatgacacaggaacatacttttttggccgctgaactcagcctgcaagcccaagcccaggccctccgcttctaaacatgactcccgaccaatggaatacccttcgccgctgcgcccgcggcgaatccctccccgccgtccctgtggcgttgatagtggacagtccgtggattcccggttacttgggcatatccacattggattatctgtttgccccggacgtctggcttgagtccaacctgcgggtcatccgggaatttccaaacattaactttattcctggtttttgggcggaaattggcatgggggccgagccgagcgcctttggttgcaaaactcttttttaccccgacaaaactccccaggtcctgccgttggtagaaacgtgggaaaatttgcccgaattgaatgaacccaatccgcaaaccgacggatttctgccttatttgttgaccctttatcggcgcgcacggccgcgattgaacgatgccggtcatgatgtgcgcattgtggccgcacgcggaccgctgacgttggccacccatttggtgggcgtcagtgagtttctcatgggcatcaaaacggaccccgccaaagcccatcggttgctcagtgtcctgtcgcgtttcatcactcaatggcttgaagcccaagccgaggctgccggccccaccgtgcaggggatcatggtgttggatgacatcaccggttttttatctccggcggattttcaaacctttgccctgccatatttgcagcaaattttccgcgcttttcctgaggcgctgaaaatttttcacaatgacaccaacaacgtcgtcccctaccgctttttgcgggacatccctgtggacattttcaacttcactcatctgcaatccttggcccgcgtgcgcgagttatgcgggccggagatctgcctgatggggaacatcccgccgttggacattttggcgcagggtaccccggaacaagtagccgaggcggtgacgacggcaaaaagctcgttgcccgacacaactcgctggctgctgtcagccggcggtggcgtttcgccgggcacccccggcgccaacatccgtgcgttctcagatgcagccgcaacacttgggcctgcagaagccaagtaacagacgtttttttcgctttaagaaacgcaaacggttgtcaagccaacgctaaatccctatataaaaaacatgcaattcgacatgcgtgtctcgtcggtcgccttgttggcggccactgcaattctggccttggctgcccctgaaccctcttgtcgcctggaagtagatgttcaccggcccacggcgcgggtgagtcctgtcatgtggggggtgttttttgaagacatcaattttggggccgatggtggtctatacggggagcttgtaaaaaatcgttcctttgagttcaaccaacccttgatgggttggcaaatcgtgaagcccccgggcggcacggccttggtgggtatcagctccaaagacccgcttcatcccaataatccgcaatacttggatgtcaccttcggtggacgcgggcaagaagtgggccttattaacgaaggttttcgcggcatgggcatccgcggaggtgaaaggtatgatttttcagttttcgccagacaggtaagcggcgggcctgtaacggtgcgggtggaattgttgaattcccaaggagaagtcatcggccagacacaaatcaaaggcttctccggcgcgtggcaacgcctcaccgcctctcttgccgcacgcgccactgaggccaaggccagcttgaggctcacttttgaaggccagggccgccttcatctggacatgatctcccttttccctcgcaagacctggaaaaaccgcccggacggacttcgcgccgacttggtgcaaaagctggctgacctcaaaccagcttttattcgcttccccggcggttgcatcgtggaaggcttcaatctggacaaccgctaccagtggaaaaacacgattggccgtcccgaagagaggcggctcatcatcaaccggtggaacatggagttcaaacaccgtcccacacccgactactaccaaagttttggggtgggattttttgaatattttctgctttgcgaagaccttggggcggagcccctgcccatcatcaattgcggcatggcgtgccagtttaacaccggcgaattggtgccgctcgatcaattagacccattcattcaagatgcattggatttgatagaatttgccaacggcccgactaacacggtttggggggcgcggcgcgcagccatgggacattcccgcccgttcaacttgaaactgcttggcattgggaatgaacaatgggggccccaatacattgaacgctacgaacggtttgcgcgcgtgctgcagcaacgccatcctgaaattcggttgattagcagcgcgggcccggaccctgatggtcctaagtttgatttcctctggccgcgcctgcgccaattgcgcgcagatttggtggacgaacattattatcgtccgccccagtggttcctcgacaacgcacatcgctacgaccgctacgaccggcggggcccccgtgtgtttgccggcgagtacgccgcccaaagcgtgcgcaccgtcagcccggacaaccgcaacaattgggaatgtgccctggccgaagccgccttcatgacgggcctcgaacgcaacggcgacgtggtgcgtatggcgtcctacgctcccttgtttgcccacgaagaagcctggcaatggcggcccaacttgatttggttcgacaatctgcgtgtttatggcacacccaattattacgtccaacaagcctttgcccgaaaccgcggggacttgattctgcccgcacggctcagcggtgatgtgggccagccggaacgcgtttatgcctccgccaccttggacgaaaaaaacggggaaatcatcatcaagctggtcaatgcaactactgagccgcgcatggtcaattttagcctcaatggcgcagtccccaccggccgtgccgggcgcgccatcgtcctggccgcagggttgaaggaggagaattccatctcccatcccacgcgggttgcgccacagagcttgcgcctgcctgctgtgggttcagccgtggcgcatcttgcgccggcacattcattgaatgtccttcgggtgccggtaaaaacaaccggccgctaattcccaagcccgcgtcatcgttgcttacaaacaatgaaccggcaaatcgtccggtggaacaaccggttcggcgggcagcgtctcggaaattttttgggcgggcacgctgtctgccgcagcactggaagttgattgaacacgacgcaccctcggtgccttgacttccttgcgataaatcagattggcggcactcgtccacgctcccatgtgcagacgtgccgccacccatcgcagactggccgccgtctccgcacgcaagcgtttcgcaattcttaccttttcggggtctcctttgggtcgccgcgataattcggcctccgtccatccgagccgtgccaactcctccttcaccaacaaatcggcttgttcccgcgcaaacatacgtcccggctgggctgagttcccctgggtttgccgcaagcgctggacaaggccggcacgaaaagcatcgctgcccatccgccaccctcgtcgcaacaaggcccacatttgagccggtggcgcaccagccaccgaacgcagccgggctgcataccgagcccggccggcatcatcctcacttaaatgcagatactcaaaaattggccttacgttcaaccaacccggacgttctacgggaggcgatacataatagcgaaggctgcaccatgaattttgggcttccggtttctcgggcatgcccgttttggcgacattcaaatgcacaaaatctaccgctgccggcaaatacggcgcagcgtcttccaccaatactgaacggtaccgtcccgccaggagatgtccgcgccgttgatgctttcggttgtatttaatggtaaatgcgcccaagagccacttcattcccgtcaccagattgggctccggtgtgcgcaccaccaactcaaaacgccgtggttccaaccggaaagcaagcacctcccaatgcaaacgcaggcaagcctgttccacggtgtcgagaaacaacctccgatcctcgtcgctccggaacaccgtttccccgccattcccctcggaggcgaggtaataaacggcacccggatattcaaggcgcagtggccgtgccatgggatgcatggttgcggaggaaacgcctccctgtcaatgccgcggacgcggccaggcgtcttcttttcactccccatccatctttaccgcgcaagttacacccattagagtattgctcattccatcatgaaaccgcatgtattctggaccctgctcgttctgtggtgcgtaataaccggctctgttgaaagcgccataccgggtgaggaggcgggctacctggcattgaccgcgcgccatcgcacaccgcccacgcttgaaagtgtgcgattaacgcgcgggccggacgagcgcatcggacgccaaactgccggatggtggcaaattgaattccgcacacacccgcgttatgaggagtcgcccgtgtgtgtggtgcgctggctggcattgggcgatctgctgctgcgctccaatcaatgcgttgttttgcgttaccaattgcgcgtcccggccacgggggaatgttatgagtacgttgagcgtttcagcggattggcattattgccctcatggggccagttccaacgtcactttttccctcatgcctcgcccggcagcggcctgcaaagggctttgcctgaatcccttgagttgctcggccacgtctggacgatgcatcacagccgtaccaatgcgcagtggcaaccgtggacggacgccaagcggctggtcttggaccgcgagctcctcatcggcaacagccgccccttcaaagaccgtgaaggcgcacgcctgccacaaactccaaaacgtcaggattatcaatacatcccttacacggcagaagacattcagacgatgatacaagccggattcaaccttttcaccatccagctggcgcaggagccttggatgcgcagcgagcccgtgttctatcaccgtcgtgtggatgccaaggcgccgttgaattttcccgcggatttataccgcgccaattatttgggcccggtcatgttcatggatgaaccctccattttgatggtgggcgacaccaacatccaccgcaccttgcgttacttttccgacgcagccgcgctcatcgaaaagcgcacccgcaccacctatgaaagcaccgggccctatggctcgtggcatctgcaccaagccctggaaaacaccggtatcaacctcggggacctccggattcaacaagtggattatccctcctgggaaacgttgtacgaaactacgttctaccaaatgcgaggtggtggtgccgggttggtccacgagggacgctatcaattgggcgaatttaatcgggcggtgcaaaaattcaccgggcaatcccggactcataccgcccgccaaatgcttgagtactactatgccttcttgagaggtggcacccggccttttggcaaacactgggggactgccatctatggccagtgcgataccaatctggcccctctggccctcacactagcttatgatatgggtgcgcgttacctgtggttttggtcatccgatcatgatcaccatgtcccttggccggagcaactcgccctcgcccggcaccttcgcttgcatgaacaaaaacaaccgcgtggcagcatctttgccaacccacccaaagcccgagtcgcgattgccatccccgatggatactttctttccttcgaaaacctttggtgggttagagtcatggacccggagggaaaaaatgaggcttctcaacgctatcaacggctgatgcgtcgcgccttaaaggctattcaagaatgttgggaccgcggctggagctttgatgtggtggtggatgacggacaaagcacaaaaaattattccaaaattattcgagttaacgataacccctgaaggccatcctcagcctccacacgcacgcataatctccccaccgacatacatccggctctttattttacgatttccgttatttcattgatgcctttgtctccttttccggctttccgctaaggacaaatactgacggatattccgcaataaaacgctaaattttctttttgggttgccgatgaatactcagagcagtttgggcaacccccttttaaggggggaggggcccttcccataggccatgcgttgcgtctttcgcgcatgtcgcacaaaagcgatgagcaggcgtacatacgagatatatgaaattaaatctagcgtccaaaatcggtagcggcttcgccgcggtggtcctgcttggtgtgttggttgggggcttgggatatctcaacctctcccgaacatcctcggcattggaggatattgctaaaaacagaatggagggcatgaaaatcttgggggaaatggtcaaggaaatgggtcaaattgacaccgcattggcggaactcctgaatgcagacatttcatctgcggatgccaaagtcgctttggaaaccattacagccgcccaaaaccggctggctgagggacaaaagcgtttttccgccctgcctcgtactgccgaggaggagaacctctggcgtcaatggcaggaaaaatcaaaagcatgggagaaggatgttgctgaatgcctgactttggcccggagctgggtggctcttgatttgggcaacccccacattcttcgtggaaacattaaccgctttattggtgaccattatactgtggaaatgaagctgttggagcaaatgtatgaagagcatcatttcaccggtgggacagaccacaccgcatgcaattttgccaagtggatgactggttataaatcgtccaatcctgaaatccaaaaaatccttgctgccgccgcccaaccccaccaaaaatttcatgaaaccgttaaaaaaattctggaatttttgaaagccaaggatgaggccaacgccttgagcatacgcgcgtacgaaatggaaaagcatgtcgctgcaacttttgaacaattcggccgtttggaaaaactggccgaccaggccgtggaccttcagagcaaattggcaaccgccttcaacacccgctgtcaacccagccaaaccgccgcgattgaatcattggagcaactgaaaacactcaaccaaaaactcggggacgatgccgcccaggccgccatggccaaggcatccttggcaaaaaaaatcatgatcgcggcccttctgattgcatcggcagtaggtgcggtgctggcatgggccatcacccgcatggtgactcgccccttgcggcaaggggtgcaactggccagccggatggccaacggtgacctgacgcagacgctctccgtgcaacgctctgatgaattgggcacttgggctcaggcgatgaattccatggtcatcgggttgcgcaagtccatcaagcaagtggcggaacattccgttgctgtggccaatacggcccaggagcttagcgccacgaatcaacaggtcagtgccaacgcagaggaaacctccactcaagcccaggtcgtggccagcgcctccgaacaaatcagcaagagcgtttccaccgtggccacggcggcggaggaaatgagctccagcatcaaggaaattgcacgccaggctgtggaagctgccaaagtggccagcgaagccgcccgcatggctgatgaaaccaatcaaaccatcaaccgattgggggccagcagcacggatattcaggaagtggtcaaggtcatcaattcgatcgccggccagaccaatctgctcgcactcaacgccaccatcgaagctgcccgtgctggtgaagccggcaagggatttgccgtcgtcgccaatgaggtcaaggaattggcccgccaaaccgcgcaggccaccgaggaaatcagccggaaaattgccgccatccaaacggacaccaccgcggcggtgcaggccatccaaaacatcagcgaggtcatcaagaaaattgaccagattcaaacggtcatcgccagcgctgtggaggaacaggccgccaccaccaacgaaatcacacgcaatgctggtgaggccgcccaaggcagtcaggaaattgcgcgcaatatcaccggtgtttcccaagcggctcgcgacacctctcaagcggtgaccggcactgccgccgccaccatggagttggcacgactcgccggtcagttgcagcaagtggtccagcgattcaaactggattcagccaccgcccacgcggaggttgaggaagaatccattaccaccgctgagtccgctgcccagccgcaaaccgcctacctcgtctgggacccaaaaaccatgtcaaccggtgtccccgaagtggacgctcaacatcaagagttgattgcccgtttgaacggtctgcatcaagccattcaacaatgcgccggccccgaggaaatccagcccatgctccaattccttggtgactatgccaaacggcattttgccgaagaggagagtatcatggagaaacgccgctgcccggcccatcaaatcaataaaacagctcaccaacgattcctcgaacaatactcacgtctggttaaagaatatgaaagcaaaggcgccagcctctccgtgttgaaacagttgcgggaaatgaccgagagctggctggttaatcatattctgaaagtggacacccagcttcgcaaatgcccgggcaaaggagcttgcggcggaaatggtcaccacaaacatgaaccagacgttatgacagccggtgtgcggcattaaattcgcttgcccgccgcctgccttgcaccgggcagctcatggtgtgccagccaagtcaggcgcaatccttccaaggtgagattgggaaaaacagattcgatttccggcaggcccttggcaatcaaggccgcgtagccgccggtggccaccacacgcagttgcttggaattgagctcagcacgcaattcgcggaggagctcgcgcaccagcccgcgatagccatgcaccgccccaatccgcatggcttccaccgtgcttttgcccaccacgctttggacatcgcgaatggtaattcgcggcaatagagcggtcttttcgtgcaaatactccgtcatcgcggccagtcccggggcaatgatgccgcccacataattccccgccttgttcaccacatcaaaagtcactgccgtgccgaagtccaccaccaccaccggcgcacccaccaacaccttggccgccactgcgtttgccaaacggtcaggcccgatgctcgatggacgtggatattcaatacccaccccgcgcaaggtccgatggtccaattccagagggcggggtaatcccaacccagccgccagctctcgcatctggagggtggccttgggcaccacgctgcagaggcacaggccacacaccggatggttgcccacaagtcttttcaatgccagcggggtggaaggcttgcttaatgcgtcggtgcgcacatccctggcttgcaacacccgctccacgctggccagaccaaaatgggtatgggtgttgccgatgtcggccaacaaaatgaggggggacgaagctttcatgaatcgagcatcacatcgccgccaatgatccgttccagccgaccccgtgcattccgcagcaacaaggcgccatcctggtccaggctctcggcccggccctcgatccgcctttctccttgcaagatggtcactttttgtcccagcgtccggcaatggctgctccattcttcggccacctcttcaaaacgcccgctgcaaactcgcgcgtaatccacgtccaactcacgcaataatgccgccgccaattccggccggtggatgggccgtcccaaggcctgccggagcgatgtcgccacgcggcgcaactcgggcggaaaatctgtggtctccaaattgacattcaccccgatgccgatgatgacatacttgattttgtccagctcggcccccatttccgttaaaatccctgcagtttttcgtccctccaaaagcaaatcgttgggccatttgatatccggctccagactggtgatttgatgaatcgcccggcgcaccgctgtggccgcagcgatggtcagttgcgtcgctgcctggggcgcgagtcgaggccgcaaaaccacagacaaccataatcccagccccgcgggcgacgcccacatccgccccatccgcccccgcccacggttttgtttttcggcgaataccaccgttccttccgccacgccatcccgtgccagccggtcggcaaggtcgttggtggaattggtttcttgaaacacccgaatctcccgccccacaaccgctgtgtcgcccaggcgcgatttcaaatcatcggcgtacagacgatccggactgctcagcaagcggtaaccgtgatgcggactggcttcgatttcaaaaccaagcgcccgcagggcttctatgcgtgcccatacagcggcacgggtgacttgcaaacgttgcgccaaatcggcgccggacaccgagccttcctcggcctgacgcaaagcagtcaggatggcggtgtccaatgcggattcactgcggctcatgttgggttggccggccgttccaaccggcgtgcgtgcttgttaaactccgccggggtctcaaagtcaagcgccacatccaccgcacgcgccgaatgagtcaaagcccctacgctgatgaaatccacccctgtctttgccattgcacggactgttttcagagtaactccaccgctggcctcggttttggccctgccggccacgagtttcaccgcctcgcgcaacatcttcggcggcatgttgtccaacaaaataaaatccgcaccggccgacacagcctccttcacttgagccaaggtatcggcctcaacttccaccttcaggcgcgggtaccgtgagcgtgcacgttgcacggcacgggcgatggcgccaggcccctcctgctgcagggctgccaaatgattgtccttgatgagcaccatgtcatacaagcccatgcgatgattcacccccccgccgcaagccacagcgtacttttccaacacacgcaaaccgggcgtggtcttgcgggtgtccaaaatttgcgcccccgtgccttgcaccgcccgcacaaaggccgccgtcaaggtcgccacgccgctgagacgctggacaaaatttagagccacccgctcagccgtgagcaacgcctgcgccggcccttccaccaccatcaagatggccccgcgtttgaccgcctggccatcgcgggccaaggaggtgatgcgtatgccgctgccctgcaactcgaaggccaaccgcgctgcttccaagccgcaaaccaccagcggttcgcgggccaccaacctggcccgcgcctgcaatttgggcggcaccaccgcccggctggtaacgtcccccgcgcctacgtcctcgcgcagagcgcggcgtaccgcctccaaccacacctttctaggcacccgtatcatgcagccatcttgcgacagctaccccccaccgaaaagcgcaaaaactgcgcaagtcccccttttaccggtgtccttcagttccggggccttcggctgccattttttcaaaaaaaccacttgtcaaagaccggtttcatggtaggttcacgggctctatttgaatttgaatatgaagtcggaaattcatccgaagtatgtggacgcggaaatccgttgcgcttgcggcaacgtgatcaagacccgctcaaccaagccgaccatcatcatcggcatctgcaacaagtgccatccgttttacaccggacaacagaagtttgtggataccgccggtcgcgtggacaagttccagcaacgtctggccaagacccaggccgcccaggctgccgcagcggccgtcaagaagaagcgtaagtagctttgttccagcgtcacgcccgcatggctgaggccttgcgggcgtggtgtttttaccggccatggatttgcggccatatattgaaaagtttggtcgccggctggcggaggtggaggcgcaactcagtgacccgcgggtttttgaacagcctcaacgcgcccaagagttggcccgtgaacatgcccgcctcaaagaattgaccgccgccggggatgcttggttgaaggccaccaccgatttggcggccagccaggaattgttgcgccatgaaccgccgggctccgagctggcgctcatggcacaggaggaggccacccgtcttcaaagcgaggtcgagcgcttgacgctccaaatccaacgtggactgctgccccctcatcctgccgattcgcgcaataccatcatggaaatccgcgctggcgccggcggcgctgagtctgcactctttgcggcggacctgttccgcatgtactcacgttatgccgaggcgcgcggctggaaggtggagtccctcgactccaatccctccgatttgggcggttttaaggaaatcatcttcagcgtcagtggcaccgacgtttttcaacgcctcaaattcgaaagcggcgtccaccgtgtccagcgcgttcccgccaccgaggcgcaagggcgcatccacaccagtacggtcaccgtcgctgttttgcccgaagcccaggaggtggacattgaaatcaagccggaggagctcgaaatcaacgtctgccgtgcctccggcaagggtggtcaaggcgtgaacaccaccgacagcgcggtgcaaatcattcacaaacccaccgggctgatagtccgttgcgcggatgagcgctcgcagcaaaaaaacaaggccaaggccctcaccgtcctgcgctcacgcctgctggaacgcaaaattgctgaggaaaacgccaagtacgccgcccaacgcaaggaacaggtgggcactggcgaacgcagcgaaaaaattcgcacctacaatttccctcaaaaccgcgtcaccgaccaccgaattgatctgacgatctacaacttgcaggtcatcatggacggggaattggatgtcttgattgacgccctcctgcgggatgaagtccaacgcaagctggcagccttagaccattccctcaccaccgcctgaaccatcaatcaaaccattcatccgtgggatcaaaggcggggatgggaatgttgagcagggtcagctttcccacggcgcgatgacggcagccgggtttgatatagacggcggtcaatggtttaaccggatacatctgcccgtccaactcgatgtgcccttcgccttccaacaccacgtagatttccgtcatcttcttgtggtagtgcgtgcgtgaatccacttcaatgtgaaccacgtgcacgctggcggcgttccccggttctgcaaaggcacgccgggcatgaccgcacggacagcggacggcctccaaggtgtcgagttgggcaatttcaaagttggccatgcctaggacttggggttggagttgttttgccgcaacaaaccatctacgtggcgtgctacatccaagagttctcgtgaatcaatagccccggccacatagtgggctgctgcattgcgcaagatggtggcctccaaagagggaagcttgcgacacaccggctccaatatcttggccatgacgcgcgcaaaagtgtttccattgaaaaaagcgaaaggcgtagctccgtggcaacggcggcataaatctaaaaactcacggaaggtcatcttttcgttccgcgccttttcccaccattgacgggtattgtcgtggccaggaccgggccggtggggtgtttcgggtttggcacagagttcgcggttgatttccacgaccgattcccacgggcaatccgccagccaagattctttggtattcagttccacggcaaatctttaagcaattcaattcccctatggcaaccgccggggtcggcgctaagttaagggcggtgcccatgcgggtcaatacgctttcgtttgacaaatgaatgtctgttggggacattcgtcaaacttttagcatgaacatgaaactatcagtcgcaggaatgagatggaaggctccggcggccctgtcggcatgcctgatgcttggcggtgtgcttttcgccgccaatactccggtgtgggtctatgaaaacaaatatgaattggtggtaaacggggactttgacggggacggccgccaggatgtggccctggtggaccggccgacgggtaattaccgcatcggctaccaattgcaggagggtaaaattacctgggccatggcgcgcccgagccgcattctttatgtcaccggcttgagcgccggtcacttgctggatcccaaaaaggatgccttggtcttttccagtgcggatggcgcggtggtgcatgtggtggacgccgctgatctcaaggtggccggtcgcatgaccgttttgaagccggactgcctagggcccgcgactgtcgtggctgtggatattggtggtgcaggcaacaccccggaagccgatttgtatctcaacagtatttataatgtggacccggtcaacctctccactctctaccggaacaccggtgggacgttcaaacaaatcgaggaagtcgaggctcccggcgccctcagtggtgcccagcgcgtaactctgcaggacggcggccccgagtgggttgtggccgtcgttcaaggcaaggaaaagtcctccctcatctttatgtccctggcctccggcaaaccggaaatcgcgagcaaggccgatgatcttccgggcggggccgcgttcgtgatgggccgattcagcggcaactcactgggtgccttggtgtacaaacccggtgaggcagccctacaataccgtcccgttgaaatcgcaggtgggaaaccagctcttggcaaggcaacctctttcaatctgccccgtgccgtccagcaaatcttcgcagcaggccaacatttgctcgtagttcatggcaccaatgacccggcggcgatttatgcctttgatgggaccaaggctcccgtcgaagcccttaccattcaacccaaacctggcgaaatggtcaccggcggttttgtggccggccaaaccattggagccttgttccgcatcgaaaagagccgtttcaagtattccacccgctatgaattgtatcaccaaaccgcaggcaagttcagtcctgccggtggcggtgagctgcctccttgtgaagtgactgacgccttcctggtgcctgaattgcaccggctgattaccagttcgctggaggtcaatgatgaggcggcgatggccccctacaccaacaacattccgggcactcccgtaaaatacgtcatgctcccgattaagagcggtgaatttctcatgggcagcccggccacggaaaaaggccgcaaacctgatgagtctccacaacacaaggtcaaagtggacgctttctggatgggcaaatttgaagtcacatggaatgagtacgaattgttcatgtacccggatgacgagaaaaagctccgcaacgatttccccaccaacccggaacgcgaccgtttgtcggatcaaatcacacgcccgtccaagccgtatgttgaaatgagtttcggcatgggcaaggacgggttcccggccattgcgatgacgcagcacggcgcgaacaaatactgcatgtggctgagctccaagaccggccattattaccgcctgcccacagaggccgaatgggagtacgcctgccgtgcgggcaccaccactgcctattcatttggggatgacgaaacgaaattggaagagtatgcgtggtttgagaaaaacagcgaggagggcggcgattggaaataccacaaggtgggtctgaaaaagcccaatccgtggggactccatgacatgcatggcaacgtggccgagtggtgccttgaccaatacctgccggattactcggcacgcgccaacggcgccgtcaatccgtgggtggtggccaccaagccttatccacatgtcgcccgcggcggcagctatgattttgaggccgccgcctgccgcagcgctgcacgtattgcttccacgccggattggaaggcacaggacccgcagttgcccaagagcgtctggtacctcaccgatgccaaattcatcggtttccgtctggttcgtccgctcaaggtgccgccgccggaagtgatggagaaaacttggattagcggcgtggaaaaagactgaggcccaagcctcgcgctttgaacaaaacaaaccggccccgacggcaagagtttgcgcagttggggccggttaagttttttcgacccattttcggagcgcctttaccaatccttcgatggtgtgctcctgagcctcaacggtgggtgcgacattcaatcgctgcaaagccttggaagtctccggtccgatggatgccgtcttcaagcgcggaaactgcgccagccgtgccggcaaatcaaatcgagcgtgaaaatgctcaaccgttgagctgctggtgaaggtaatccaatctgcaccttcttccttgaaacgttcaccggcaccggtgaggtcctcggtttcggccaccgtccggtaacacgccacatcgtccacaatcgcccccatttcggacagcagacgtggcagctcagggtttgccgtttcggcgcgtaacaacagaattttcaagttttccacgctgccatgctcgcggatggcctcggccacacgcgtggcgagatactgcggcggcattgcgtccacccgcaggtgcagctcctgcaatttggcggcggtggcggggccaatggccgccaaacgcacattgcccaaggcacgcacatccccaaaggctttgaagaaataatcaaagaaagaggtgaccccgttgggactggtgaacacaagccagtcgtaggaaccaatgccttccaaggcatcctttaaatcggtgagttgctggcggtccgtcaacggtgcaatcttgatggtggggatttccagtacatccgcccccaattccaacaattgccgggaaagctggctggcctgttcgcgcgtgcgcgtcacaacaatgcgctgaccaaacaagggccggtgctcaaaccaattcagtcgatcccggagttggaccacatcgccaatgaccgtcaccgccggcgcagcaaatccgcgttctgccgccaagtcagcaatcgtggccagtgtgcccaccaaggactcttgtcggcccgtcgtgccccagcgcaccatgcccacaggggtggcaccgtccatcccatgccgcatcagctccgatgcaatttcacgaatccgctccacacccatgagaatcacctttgtccccggcgtgcgcgccagttgagcataatccaaggtgctgcccggtttggtggggtcttcatggccggtgaatacggtaaaggaagaacagcagctccggtgtgtcagcgggatgccggcgtagttgggcgcggcataaatggatgaaatgcccggcacgacttcaaagggaatattcgccgcggccagttcttcggcctcttcgccgccgcgtccaaacaagtaagggtcgcctcctttcaggcgcacaacagtcttgccctgccgcgccttttccaccaacaacgcattcagtttctcctgcggaatggcatgggctttggctcgtttgccgccgtagataatctccgctccacgcggggccagccggaggagttccggattgaccaacgcatcataaaccaccacgtcggcccgccccaacaactccgcgccccgcaaggtcagcaggccggcatcccccggccctgcgcccaccagataaactgtgcccaccgatttcacaacgtcagtttaggcgcccgcgggcgtgtgcgcaacgtcggcctttgttaatcccacggtttgcagcaagtcaattccttcgacttttccgcgtgacaactgtggtcactcatgctctaaacgcgggccatgacgctggcaactgactttgtgcaagcagcagagccggattcccggtggctgatggttgttctccatggcttgggtgacagcatggaaggttaccggtggctgccggaggagatgggattgccgtggctgaattacctgctcgtcaacgcacctgatccctatttcaccggctactcctggtttgattttcccggcgatccgatgcccggagttcgccgcagttatcaactgctctcccaactcctcgacgaccagcggcaggcaggcttccccacccaccagacctttatgtttggcttcagccagggctgccttatgacgtgggtcaccggcgtcaaatatcctcaccggctggcggggtgcattggcatcagcgggtttttgccggaccccgaggcgctgcttagggaacgctcctccatggcccagcatcaacattttctcattacccacggaacgatggatcccctgctgcctttcgccgccgccaaggcccaagtccagaaaatgcaggccgctgggctgcaaatcgagtggcatgaatttgacaagcctcataccattgccggcagcctcgaaatggcggtcatccgtcgtttcgtccaacgacgccgcaccgcgccctcctaaacggggcttgcgggaatcggggaagccggtattttgagcaaggggaggcgcccagtgcgcgctggacaaaacgtccgccgttggcgcaagccgccccgtcatcattaacctattggcatcatggaatcattatcgggaaagactggaattgtctttggtgtggccaacaagcgctccatcgcgtgggccattgcgcaggcctggcatcgcgccggcgcgcgcctggcttttacctaccaaggcgaacgcttgaaagagaacgtgaccgaactggcagccacccttggctccgacacgttggtgttgccatgcgatgtgacccgcgatgaggaaatccagcaagtgtttgccaccctggaaaaacagtttggccgcttggacctgctcctgcactccatcgcctatgccccgaaggacgccttggaggggcaatttgtcaacacatcgcgcgaggccttccgcattgctcacgatgtcagcgcctattcgttggtggcactttctcgcgccgccgcgccgttgatgaaagagggcggcagcatcctggcgctcagttactatggcgctgaaaaagtcgtgccccactacaatgtgatgggagtggccaaggcggcattggaagcctgcacgcgctatttggcctacgacctgggtccgcaaaaaatccgcgtcaactgcatcagcgccggtccggtcaacaccttggccgcacgcggcatcggcggctttaccgacatgttgcggcactacgagctcaatgcgcccttgcgtcgcaatgtgaccttggatgagcttggggccaccggccttttccttgccagcgacggcgctgcagccatcaccggccaggtcatttatgtggactgcggctattgcatcatgggcatgcaaacggccgcttccgagacatgaacccctcctcgcccatttcttcaagactggctgctgtgcgcgatcacaaccgcgtctttgcggaatatctttacgtctatcccgtgatttcgcgccgctcccgcggcctgtccctgggcgtcaatctcaaccccgacaaacgttgcaatttcgattgcatctattgtgaagtggaccgccgcacaccgccgcgcacaacgcggctggatgtccggcgcttgcacgatgaattgctggacctcgttcgccgcgtcaaaaatggggaattattggccacgcagcgtttttccgaggcccctgagctggtgtcggaaatcaaggacatcgccttcagcggcgacggcgagcccaccatgatccccaacttctgcgaatgtgtggaagccgtggtcgaggtcaagttggcagaaaacctcaccaacaccaagctggtattgatcaccgatgccgccggtctcgacaaggccgatgtccgccgcggtctggcactgatggatcagcatcaaggggaaatctggggcaaactcgatgccggcaccgatgcctattaccgcctcgtcaaccgctcgcacgtgcagtttgggcgcattctgaaaaacttgttggaaaccgcacgcgtgcgtcccatcgtaatccaaagcctctttctacgtgttcacggccaacccatgcccgcgggagaattggaagcgtattgtgtgcgcttaaacgagatgttgcagcaaggcgcccaaatcaaggaagtacacgcttataccgtggcccgccccactcctgaaccatacgccactgccctcttgcctgcggaattggaggcgatggccgaagttattcgaaagcgcaccggtttgccggtgcatacctttgtttgatcatcctctcacgagccttcgcaaaaaaccgtccggctcggcaatgccctgctgcacaatgacagcggcacgctccggcgtgtcggccactgcataaatgcgcaactcgtccgcgttgccggagggccgcacatgcgccacatcgccgttggcaaaatacaggcgcaaaccgtcaaggtaattaatcttcaccaaggttccaaaaccggcctgagacgaaaagatggcactcaattgcgagcgcacttgttccaaatgcgcctgcaaaccgggtgaaacaggcaggtcttcacctgcagcattccgtgtggcaaggtggccggtgctccaatcggcctcaatgacttgtgaatcctccggctgcagaggtttcaatgcagccaaactcgccgaccgcggtacattgggcagcagaccggcctgactgtaacgccgcggcaaccggtcaaataattcacacaaagttaagccctgatcacgggcggcaaacaggcagcacaacaagggtaagaaggcatcccgcgtggggagggcgctcaacaccttgcccccccgctcaatatcggttgccgtcaaaaaaccgccgttggcttcccagccgcatacacgggatttgccccgggccaccgcctgctgcaaaccggcaatgacatacggcgagccgatgcgggtcttgggttgcaacaacccgcgcaacggcccgcgatccacggcgtcgttgcacgtaatcggaaccactacggcatccgcacgcagaaattcagcggtaatcatgccgagcaggtcgccgccgaagaagcgcacacgtccctccggcgtcacccccaacatcaagggccggtcactgtctccgtccaatgacaacaccgcatccacccggccgtgattggccactgtttcatccaacagcctttgaatgttttgcagcaatcccgggtgcacattttccgtgtccacggccacaaagttttcgcttcgtcccgcggtcaccaccgtggcacccaatgcctgcaggacctccaccaataaatcccgccccacggcggagtgctgatacaccaacaaccgcaggccctgcaggttgccacccgcaaaaaaattaacgtaccggcgtgcatacgcccggcggcctgcgggactttccagcggcagctccacatggccacgcttgaacatgccgctttcattgaacaaggattcatggaaaacctggcggtacaagcgctcccgttcatgcgccacccgctgaaggatgggtccctcatcgcttttacgcaattcgccccggctggaataggtcttgtatccattgcggtcaaaaggaatgtggctgccggtgaccatcacgcagcccttttgatgatgcaaggcgtgggcagccagcgccggcgtgggaatggcacccagattaagcggtgtcatgcccgcgtcctccgccgcctgcaccaccgcctgcgcaatttctccgcgcccgcccaattccggcacaaaccgcgtgctgctggggcgcaaatcataggcgaaatagaactggtccccgcgtttgattccaccctcggccacaggcagattctggagataattcaactcggccaaaacgttgaggtagatttcgagctgggtcaaatccaccacccgtccgcgccgtccactggtgccaaactgcaagggcaccggctcgtaatttagaaaagcccgcagggaagtcgggggataatcgtttacgctcatgacttgtccggtggataaggtgaaagtcgcaagggcgccatcggtgtaccgtccggtttcacaagccgcgcacaaaaaccccaaccggaggtccactgggtaatttttaacatcagtgcattccaacccgcacgcaaagcaacattggcctgaaattcgccgggtttcacatcacccccgcggttggcactcacgaccacctgcccattgacccaggctttgatgccgtcatcggcgcccagttccaaccgggcctgctgggcagtctcactatacacccacacccgcgcatacgccacgcgatggtcgcccggaaaaagccccgcaaggttgatttgccacggccggtctttcagcgtccccaccggcgccatttgccaggtaacgcttgaaggctcgggattttgctctggaggaaacacctggtcaaacaatgcctgtccatccttgccctccattgtatatggcccggccacctgccaaccaagcaggaacccgcctgctttttcaagtgtggacaacaattctgcagcggcctttccagcggctggcgatgcagacaatttggaaagcacccgccgcgatgtttcgggccatgcaccggccacgcgaggggccagccgcaacactgcctgcccggcttccgcacttaccgccgggttgtccagcagaggctccaataacagcaacgcctgctcgtgctgcagtccggaaagtgcgctgatgacgagtttcttctccgcatcacttcgcgcaagagacattgcctcggtaaaccgggccgccgcccatgcgggcgttgcgctgccttgccccaggagccgggacgctccccgcaacgccagtacgcgctcggtgttttgtgtggcttgccgtgcttccgccaacaacaaatccaccgcactcacatccggccattccaccaatgcgcggagggctgcgtcgcgcaatgctggttgtgtttgacggcgctcgttctgcaaaactttcaaggcttcggcccccccacaagccggcaacaatcgcaacaaggacacgcgcgtatccacggcatctgctggtacacgctccatggcttcacgcaccactgccacgcgccgcgccgcgtccggctcgcgttccaagactcttaggattgtcgtctcggcctcttcgcgggctgccgccgcgcgcatccttgtcgattccgtgatcagagcgggcaaatccgctggaccggccaaccgtcccaaagcgcgaaaggcagcccgagcaatggacgggttttcacttgaagctgcttgaagcaaggccggcatggccgacttgacgccgcgccgtcccaccgcattcatcaagccgggaagcgccgctggcgggctgttgccgatggcctgcaccagcgcttcatccacccgtgcccctcccggcaagctggccagcgccatctccactgtttgttgttccgcgctggtggtgtaagtggccagcgctttcaccagcaccggcaccgccgactcgtcacccacttgggccaacgccttcaccgcggcctgccgtactgcggcggccggcgccatcgtggcacttttgagagcttctattgcatcggtatcctttcgcgccgcaagggagtccagcaacaaaacctgttccactgttgccagccgggccatctccgctgcaaacactgccgagactccgcgccccggcataaatcgcacctgatggatggcagatggtttaagacctgcatccgtgccacgcaaaaccgtcaaggcccgttgctgtcctccatcagcatccagtcgcatcaacccctccagcgcagcccgccgcacatacaggggttgattggccgccagcaattcatcataaatggcagtcgccgcccggacattgcgcgcacgggcagcatgatccgccgccaccagcgatgcctgcaccgccacaggagccacaccggcatctccattgcgccgcaaaccggccaatgcctcgagcgcctgtgggttggcaatcttgcccaaggcgccaatggccgcctcgcgcagcgcgggcggggcttcctgcgcaagcgaaatcaatgctttcacagcggccggagcgcgcctgtcacccaatgtgaccacaatctgctcgcgcgccgccggctcggcattatccaatgcctttaataaaacgtccgtggctttggccgatggattggaggctaaagccaggctcgccatgcccactgtgttggagcttttcaacatctcgcccaacgtactgagcgcgctgtcgctgcccaaaatggccaattgcgtgcaggcaaaacggcgtgcttcataagtggcctgctcggacagcaaccgcaccagtgcattctcaaccgcgctgcgtcgcgagcgattggccacagcctcacgcacggcagcctcgatttgacgcaaaggctcggcactgcgccctgattgatattgcatggcctccgccacggcctgctccaagttgatttgaggtgtgggcgccggcgcggccgtcaacgtcagacacaccaacggcagcattccccaacggaaagtcgcaaaggcctttcgtcccacgctcaaaaaaccggccaaatgggttgaaatcataatttccaaatcaatcattcaggttccgcttccacaaagcaccaatccaaaaccggcctcgtcctgcccgttacacccgccatggcgcacgcggctggcggtacaacatccggttggcggcttcgtcatcgaagacttccttcaccggatcccagcggagctttttgcccaatcgcgcactgatggtggtggcctcgcaaatggtttgtgcgcggtgggcaacctccggattgcacaacggctgctggcggctcttgatgcaatcgaggaaattgcgcacatgcgcgccggcattggcccaactcacccagccgctggttttggcatcgagaatggaagccggttgtgcggtgaccacatcggtctcgtcgtccacttgaatccatccctcatcgccaatgtaccggatgtacctgtctttgaaggctcctcgttgatacaaaatcccttgaacaccgttggcatatcggaatttgaaagtgccggagatggcggtctcgctcatgaatttttgcgggtcgggccacaccaaatccgtggcttcaaactccaccggccctgtgtcatcggtccccaacacccattgcatttggtcggtgtaatgcgtgcccatgtccgtatgcatgccttcacctgtgtcccaaaaataggcccatccaaatacgcgcccgggcacaaatggccgccactgcaccggccccagccacatgtcgtaattccaacccggcggcaccggcttgggctcttcatgcggcactgtgccccctgtccaaacctgcatctccacggtgtggacacgcccaatccgcccccgacgcaccatctccctcgcgaattgataagattcggtggaacgccgttgcgtgccggcctgataaatggtgccgtactggcggcacatgttcacaagctcgcgcccctcgcggatggtcaagctgatgggcttctcgcaatagatgtccttgcccgcccgcgctgcaaacatggaagctgtggcatgccagcggttgccggtggctatcaacaccgcatcaatgtccggccgcgccagcagatcccggaaatccggcatgtctgcgcagtccttgttcccatagaattggtctacgtgattcttggccacctgtcggcggtccgcccgtgcatcggacaccgctacaaatttcacgtctggaaaattcaaaaaattgggcaggatgaacatggcccggttgcccatgccaatgcctccaaaaacgatccggttgctgggtgccaccgcgccgttgagaccgagcacggagccggaaacaaccaggggagccgccagcgcgcccagactggataaaaagccccgacgggtgcatttcattccatgatgtgtagtggccgtcataaaattgcctgcgagtttttcaagggaacttgctgtctccctttatcctccggccatcccgcccggtcaagcccgcatccgcgccccccaccttctccggccacacctccggcacccctaaatgatggtgccgtccggaatgattgcgtttttcggaataatcacaattccatcgcggatgtaatagaggggatggtccaccttgtccggtttgccgctggggctgatgaccacgttgtcaccaatgcgggcattcttatcaatgatgcagttttcaatgcgcgtgttttttccaatccccatcgggggttgtccacgcgcctgatgctccgcaatggattcggccgactcgtaaaagtcgcatcccatcaacaccgtgcgatgcaaataactgcccgagccgatgatgctgcgcaggccgatgaccgagtaggcgatggcggcgcggttgatgatgcagccatcggcaatgatggcatggtcaatggacgccccgttgaccttgctgggcggcagatagcgcggacggctgtaaatcaccgcgtgcatgtcaaagaaattgaagcgcggcagctcgctggtgcagtccagattggcttcgaaaaagttgcgaatggttccaatgtcttcccagtacccgagaaacacatccgcaaacacgcgatgcgagtgaatcaggcctgggatgatgtgtttgccaaaatcggtgtggggcgtgtccatcgcctcccgcaaggttgagcgattgaacacataaatccccatcgaggccaaaaacaattcttcggagcttttaattccgtagcggctgtaagaggcagggtccaatctcaaaccgtcctgcaccgccggatcagtcggtttctccacaaaattcacgatgcgcgactccgcatcaatctgcatgatgcccaggccgccgacatcccgccgtggcaccggcgtggtggccaccgtcacgtccgctttgtgctccacgtgccgccgcaaaatatcctgaaaattcatccggtagagctgatcgccccccaggatgatcatgtattcccacggatggttgtcaaaatgcgtccagttctttcggatggcatccgccgtcccttgataccatgaggtattggtcaacgtctgctccgcggcgaggatttccacaaatcccccgctgaagtggtcaaacttgtagctgccattgatgtgccggtgcagggaggccgtgttgaactgcgtcaaaacataaatccgccacaaacctgagttgatgcagttggaaatgggaatgtccaccaaccggtattttcccgccagcggcactgccggctttgaacggtcgcgcgtcagcggaaacaagcgggtgccctgccccccgcccaagaccactgcaagcacgttccgggttccgatgggttgttgaattggcgcttcaggcatatggttgattgcagccgtttctgattggcagtctcagtgtaaaacaaccctccccccttttcaagcgagattgagttattatcctctaaaatatccgccgttgcttcctatgcctccacttttcaagccgggagcagaagacattggacaaatccggccctgccacttactttatgggagatgcggttgcttcgagtcatcgccttttggctgctggcgctctacctgccggcaaccaaccattgccttttggaaacggctacggggctcgaagtacttcaaagctgctgcgagcgctccgacacacagcaggccaattcctgcgaaacagatgcctgctccgttgtagaatccggggcttatcgttctgaagagaatccgccgttgctgcaacccccgtgtccggtgtacttaactctcgtctgcaacacgccggatttcctccttgcagaccaagcccagtttgcagcttgtgccatttctgcgtcgctgttcctaccaaaaccatgccatttggcatggcccgtatctgcccagccacgggcgccttcctcaatctgatgcagtagctccgcacggagctgactctttcgtttcccccaagggaacatgaagggggtgtggtgtcgttggacacccgcccaaaaaccatcgcataaaaaatttttcaaacagcaacgtttgcatgattactgaccacgcaccattgcatcagaaaaaaagaaacagccgaaagctttggctgattacaggctgtctcgtgggctgttcgttgtatgccgccgagcgcgagcccatcccacccctcacggtggagcgggcagtacaactcagcttggcccatcaccctcaattgcgagtcgccgaagcacggcggcaggccgcccacgggcgcatgattcaagccggccgttggtccaaccctgaattggagttgaaagccgaggaatggcctgtcagtggaggaggaaatttttctgacgccaagcataccatcggcatttctcaaaccgtgccctatcccggtaaaaaacgctgggaccgtcaacttgccctgggcgacattcagaatgagtccgctcaattggccctggtcaaaaccgacattgaacgtcaaacccgtgctgccttttacaaagccctggccgccaccaacctcgtcattgtctcggctgaattgcttgcgcttgccgaaacttcctcggcttccgtccgccggcagatggaagccggtgcggccacgcgtcaagaattgctgcgggttgaattatacgaggaacaaacacgcgccgaacacgcagctctgcaacaagaatgcgtggccgcccgccaggccttggacacgtggctgcaggatgtgcaatggcagcaggcacctctgtcgggaaatctcgaggaaacgcctgcggaggacctccttcaaataccctttgagcaagctctgacgcgccatccggcatggttggccgcgcagcttgcggaaactcaggcccaacattttcaacgccgcgctcggttggaaccttatcccgatgtccggttcagcctcgcaggaggccggactggccccgctggagaatccatcttggaactgggcattactttgcccctgcctttatgggaccgcagcaaaggccgacaactcgaagctgaagctcagtcccgcgctgcggcagccagcgtgctggttgttcggcaggaacttcatcgcacatggctggccgcctgccaacggtatcgtaccgccattgaacaagtccgactccatcgcgagcgggtcctcaccaaagccgaagccgctttggaggccgtgcgcaccgcccaccaagaaggcaaaatccccttgatggatttgctggacacccagcgcacggtggcccaaacacgcctgctttatcaacaaaagctgctcgaacttgccctggtgcaaaacgaactccgagccctccttttcccccactcactgtccaaacctgctcaaccaagtattgatgtttatgaaaaataatccctcccggctcttgtcatccctggccctggccgtgttggttatgattggcgccatggcttgccgcaaagccgactccggcggtgatacccacgaccaccaaggccactcccataaatcagcagcctcctcatcgcacaccgacgacggcgcatcgcccatgtgtgaagaacatcgggtggcggaggccgaatgtgccatctgtcaaccccaggccattgccaaattgaaacctggacaagccctcaagctgcgtctcccttcgacctcatcggcggatttaatcggcctccaaacaggccagccctccattggcacagtcgaagaaggcatcgaatgtctgggcgaaatgcaatacaaccaaaaccagcttgcccgcattgttgcaccgttggggggaattttggagttggtggaggttgaccagggaacacgcgtgcaacaagggcaaaccgttgccaccctctggtcagccacccttgcggaggcggtggccaaagcagtgctcacccatcaaactttggaacgggaacaaaaactgaacgcccagcagctttccaccgccaaagacttgcaggaagccgaagcggcgcaccgtgcggcctgtcaatcgctgcgtctgctgggtttcactgaggcccggattgatgaattggcccgtcagcctcaggaacgcgttttgctgcctgttcaaaccccgttggagggcgaaatcgtggagcgttttgccgtccggggggagcaagtcgaagcgggacgtccgctgtttaccgtggtgaaccggtccaccatgtgggccatcttgcatgtcccggaagccagtgcatcggaactccaatcgggccagacggtggaactgcgttccgaggctctgcccgatcgcgtgttccgggggcaattgacatggattagccctgccgtggacgaccgcacacgtttagtgcgtgtgcgcgccgaagttcccaataccgatggactgctcagacatcaaatgtttgtgcgggcgcgcatcctcacccgccagcgccaaaacgccttgctgctgccagccgccgccattcagcgcgtggacggccgacccctcgtcttcgtcaaactcgccgaggacctgtacgaaacccgccttgtaaccctgggccccatgaacggtccgcaaatcgaaataaccgtcggcctgaaaaaggacgacaccgtcgccatcacccgcaccttcgccctgaaaaacgcgatgttgatgtctcgcttgggagccggttgcgcagatgattaattccctaaacagaggaattttcatgttggatcgtctcattcgttttgccctcgacaaccgcctgatcatcggcgttctgacggcggtcatcgttttcaccggcgtttgggccgtccggattttgcctgtggacgcttttccggacaccacgcctgtgcaagtccaaatcaacacctcagccccggcgctgaatccggaggagatcgaagcgcaaatcaccatccccatcgaacaagccatcaacggcctgcccgggctcatcaacgtgcgctcactttccaaattcggcttgtcccaagtcgtcgcgacttttgaagaccgtgtgagcatccttcaggcccgccaactcatcacggaacggttgcaaagtgttgaattgccggagggtttggagcgacctcaactcggtcccatcgccaccggattgggtgaagtatttcattacatcgttcgctctacggacaccaatcgcaccctgacggacttgcgattgattcaggattggatcgtgaaaccccagttgcgccaggtgcgcggtgtggcggaaatcaacacgtggggtggttttgaaaaacagtttcatgtcatcgtggaaaccgggcgtctcatccagtacggtctaaccttggagaacctctttgacgccctgcaggccaataatcaaaacgtgggtgggggccagatagtgcgcaacggcgaatcgcttctggttcacggcatcggcctggccaccaacgccgctgcagttgcggagattgttcttgccacccatgacggcataccggtgcgtgtgcgcgatgtggccaccgttcgcgaagatcacgaaatccgccgtggcgcggtcaccgccgacggccggggagaggccgtcctcgggttgggcttcatgctgatgggcgaaaacagcgcggtggtcacccgcgccctcaaagccaaactggccgaagtccaaaaatcactgccgaacgacatccgcctggaagtgctctacgaccgtaccgaactggtggatcaagtcattcgcacggtccaacacaacctgctggccggcgcgctgcttgtggtggccgtgttgttcgccatgctgggcagcctccgcgccggcctcatagtggcctcggctattccgctgtccatgttgtttgccggaaacctcatgttgcaaacgggcatcgccgcaagcctgttgagtctcggagccattgattttggactgttggtggacggtgccgtggtgatggtggaaaacgccatgcgccggctggccgaacaacaggagcgcctgggccgtccgctcaccaaggaagagcgcgatgctgtgctgcgcttggccccgctggaggtggtgcgccccgtggcctatggcgtagccattatcctgttggtattcctgcccattttaactttggaaggcatcgagggcaaaatgttcaaacccatggcgctgacctttattttcgctttgctcgggtcctttttgttgacgctcacatggacgccagtcctggcgtacacttgcctgcccaagcagttgaaaaagggggaacctttgttggtgcggtgggcgcgccgtctttacacacctgcactggacatggccttgcattttcgcaaattgacactggcagcggccaccctgttggtccttggcgccgtcctgctcgccacccgcatggggggcgaattcctgccccgcctgggcgagggggccatcgtcggcaccactgtccgcctggccggtatttcagttgaggaagcagtcgagcaaaaccaccttttggagcaggctttgttgcgtgagtttcccgatgaaatcgcacacatctggacgcgtttgggaacagccgaggtggccaccgatccgatgggcgttgagctggccgatttctttctggccctcaaacctcgctcccaatggacaaaagcccgcacgcaatcggaattgacacaaaagatgggcgcgctgttggcccaggtgccgggtctcaaaacggctttcagccagcccatcgaaatgcgaatgaacgagctggtggccggcattcgcggcgatttgggtgtgaaaatttatggggatgaccttgaagttctgcgtcggctgggtcaggaagttcaacaagctttggcccgtgtgccgggggctgctgagattagtctggaacagttgaccggtcagggcgttctgcaagtgcaagtggacaccgaatccctctcacgccacggtcttgcggcgcgggatgtgttgaatgtcgttcaagctgtgggctcgcatcgtgtgggagacgtgcgggaaggccagcgaaggtttcctttggtggtgcgcctgccggatcgtcagcgcagagatcccgttgcgttagcggccaccctggtgccgaccgccggcggaccggtattgcctttgtcgcagttggccctcataaccgaaacggaggggccggccaccatcaaccgggaatggggccgccgccgcattaccgtccaatgcaacgttcaggggcgcgacgtcaaaagttttgtcgaggaagccaggacggcgatcgccaatcaaatccaactgccggaaggttacaccatcgcctggggcggtcagtttgagaacatggaacgcgccaatgcacgcttgaaatgggtggtgccgatggccctgacactcattttgatcatgttgtttttcagcctcaaatctttgcgcgatgttttcatcgtcgcttccggcattcctctgggcgcggtgggcggcattattgcgctgtggtggcgcgacatgcccttcacggtgagcgctgccgtggggtttgtggcgctgagcggcgtcgccatcctcaacggcctggtgctggtgactttcatccaacaacgtctggcggctggaatgccgctgccgcaggccgtgcgtgaaggttgtctcacccgcctgcggccggtgttgatgacggccgccgtggtggcgctcggttttttgccgatggccgtcaatgttggagtgggaggcgaggtacagaggccgctggccaccgtggtcatagggggcatcttcaccaacacccttctcaccttggtggtattgccagccttgtacgtctggaggggctccaagtctccttctgcaacttgaggcccgtgtttaggccagtgtcccgcaaacggggcattggggcgagcggcgtgtgcgcacttttttgaatgtcatggtgcgcaaatcgcaaagcaacaattcattcttcaacggctccgccacaccggtgatgactttgaatacctcgacggctgccaggcatcccgccactcccgacacggcgcccaccacgggaaactggcgtttccaatcgggcggtttctccgggcacaaacaggccagacacgccgtttggccgggcaggatggtggtgatttgagcggtcatgtcatacatcgcgcactcaatcatcggcttgcgctgccgcacggcctcgcgattcatcaagaagcgctcttcaaacaacggcgccgcatccaccacgacatcggcctgccccaccaatgccgcggcgttgtgctcccgcacattttccggcaccgcaataatttccacctgcggatttaattcacgcaaacgccgcgcagcacattccacccgcggcttgcccaaccaatcgtgggtcatcaaaagttgccggttcaaatccggaagccgcaccacaccgccgtgggcaagcaccaaccgccccacgccggcggcggccagttggtaggcgacttgcccgcccacaccaccgatacgcgagatgagcacggtggccgccttgaggcgtcgttgtccctcctcaccccagccgggaatccaaagttgccactcgtagcgctgccgctcttcttcggtaagtcgtgagggattggacatgctgaacatccttaactttcaacctctacaatggccccattttccaaacggaaaacgcggtcggccagttgctgggcgtcctccggatgatgggtcacatgcagggtggtgaccttggtacgggcgcggactgttttaagcaattcgtacatctcgctgcgagtctcctcgtccaacgcgctcagcggctcatcgaggcacaaaatccgcggctgtatggccagggcacgccccaaagccacccgctgggactcgcctccactcaacccctgcggtcggcgatgcagcagatgctcaatgcccagccattgggagaggctgtgcacccgctccttgatttccgccgccggcactttcctcagtgtcaggccaaaggccaggttcgcctccaccgtcatggtttgaaacaaagccctgtcttgcggcacatacccaatcccgcgccatgccgggtcccagtctgtgacatcttcaccatcgagccagatgcgcccgctttccacctgccgcaagccgcacaaagcctccaacaaggttgtcttgccgcaaccggtccgccccatcaacaccgcatagctcccctccggcagttcaaagttcaactgcgacaaccgaaaggcgcctgcacgcacgcacatgttttccacgcgaatcataagggttggccctgatggaaacttgtgcccgagccaaaccagcgcaccaccaccaacaccgccaccgccgccccaatcatcagcagagacacggccaccgccgcctccagcgcgcccacgctcaattcaagaaacaccgatgtggacaacacttccgtcttcatccgcgtggccccggaaaaaacgaggatgggcccaaattcccccagagagcgcgcccacgccagcgtaccggcggtcagcacgccacgacgggcctccggcaatgtgaccctccagaaggcttgatggcgcgtgcatcccaaagtccgtgccacctgttcgccgcggggactgatttggtcaaaagccacacgcatggtctgcacggcaaaagcacatgccacggcaaactgggccagaatcacactcggcaccgcataggtcaccggcaagtaacgttccacccagcgccccggggcggtttgaaacaaaatcagcaggcttaacccaatcaccaggggcggcaaaacaattggaatgtccagcaacgcctccaacaaacccttgccgcgaaattgataccgcgaaagcaggtagcccagcggcactcccacccaaatacaaagtaatgcagtgatgctgcaggaaaggagactcagccggatggcgtattgaatgttttcgctgcgcaaggcattcatcaaatgcccaggcgaggtataagacaaatcggccaccagcatggccacaatcaacaccacgtaaacgcccccaatcaaagccagcccgatgacaaacggtgtgtcggaccgcgtccgcaaccgccggcttgagcctgaatgcgccgtggatgatgtcatgcggcctcagtatagggcttgagctgccaaacttccacaaacaagcgcataccatgaaatgaaaagctgcctccgattcaaacattgtgccgaccctgcattctgcacttgcagctttcggccggacagctaatgctttgcgccgaataaacttatgaactatcacatttcacaacgcgccgcttcactgtcgccctcgctcacgctggccattgatgccaaggccaagcaaatgaaggccgaaggccaggacgtcgtgggctttggcgcaggagagccagactttgacaccccgcaacacatcaaggacgccgccgccgaggcgctggccaagggtttcaccaaatacacccccagcagcggcatccccgagctgcggcaggccgtggccgacaaattcaaacgcgacaacggcctgacatacaaaccctctcaaatcatcatttcctgcggcggcaaacattcttgctacaacgtgatccttgccacgtgtcaggaaggcgacgaagtcatcattcccgccccctactggctgagctatccggaaatggtcaagctcgcaggcgccaagccggtgattctgcccaccaccgacaagaccgagttcaaggtcaccccggatcaattgcgggcagccatcacgccgcgcacgcgcctgttcatcctcaattccccgagcaaccccacaggcaccatttatgaacctgaggaaatcaaggcgctgggcgatgtgtgcgtggaaaaaggcgtgctcatcatgagcgatgaaatctacgaaaaacttgtctatgacggggcgcggcacgtgagcgtggccactttcagccaggcgcattacgagcacaccatcatcgtccacggtctggccaaggcctactccatgactggttggcggttgggttatctggcggcgccggaacccatcgccaaagccattgatgccatccaaagccacagcacaagtaaccccacgtccttcgcccaaaaaggcggcgtcgctgcgctcaatggtccccaggatcacttggcggcatggctcgccgaatactccaaacggcgcctcttcgcctggcaaaaactcaactccatcccgggggtctcctgtgtcaacgcccgcggcgccttttatctcttccccaacatctccggcaccggcttgaagagcaccgagttctgcgcccggctgctggagcaggaaaaagtcgccgccgtgccgggtatcgctttcggtgccgatgactacatacgcatcagttacgccacgagcatggccaacattgaaaagggcttggagcggatggagcgtttctgccgcagtttggtgaaggcttgagcgtacgcacagcgtctcaaccgaattcattgttgggcctccaacagcatcggaccttgggagttttgctcccaaaggtccgaatcttttttgaggaagactgacgccttattcaacgcttggcgcgtcgcggccatcccggcggaatggccaccgaggccacggtgttcaacaaaaacaccgccaccgccacaccattcaagatagccccccactggcgggcccaaaagatatcggccaagtcgcctgttacccgtaaaaccagcgcaccgtgtaataacaccacgtgcagatacaacacgggccgatatgttgccgtaaaattcaaaatggccggaaagatgacaggggcatgcccgaaaatcatggaaaacacaaacccgacaaaaaaactgtgcaacacggcatcgtagggaaacggcccgctctccaagggactgtagcgaatcatccaaatcccgctgaggcccatccaaacataccctgtgagcagacagacagccatgaaacgtggcaagcccggatgccggatggtgcggcgcgccaaatcaaaccatccgagccagcaggccaacgccagcatgccggtgcctgtcaggcgctcacccggcacctgccaccacacgctcatcaccacgccggtcatgaacaacgccagcgcgccgtaaaacagaggacgtgaccactttgagggccgcgtgaagcggttcaaatccagccgctcccccacaatggtcaaccccagaaaagcgatccaccaggggacaatgcgattgaagctccagccctgtgtccacagtccattacccaccacccaacaaagggcagccacggccatcaacaccgtgaaaagtgccttctgaatggccaccacacgccacgccaccactgcaaacacggcgctgccagacgcaaccaaccatacgggatgcggctgggtcactccgccggcaattgcaatggacccggcagccgttaaaatgggcggaagatacgtccaccaggaacccaacccgacggcgcgctccagaccgatgaccgtccccaaaaatccgcataccatgagcggtccgtgaaatgttatccaattggctccgtgctcgggcgtgggcaggttcacacccaaccgcaacaaacctccccaaatgccggagaccagacatgccatggccagcaccacccacggcgcgcgcccggcacgttgccagcgttgattgattgcctttctgtcctgcataagagctggcggggccatcagcactccgcggcccgccaccatcaaaatacaaaatcaccagccggcaggtttgacctgcgccaattttatcggttttttgggcgctccgctaaaaggcgctaaaagagggtgccaacggccatgcccaacacactgagcggtccctggtcctccaagccttccgttgctttgtcgagtttttggagggtgagcttggcgtttttgaacagactttcgtcattgacgagccgccctaccgaaccttggccgcggttgattttttgcatgatctcgcggaggttggtcatggcggtcgaggtctccttgtaaagctggtcgtctttgagcaacaagcccaacgtccctttgccggcctgaaccccttcaatcatttcgttggcgcgcgtcagcgcaaggttgagattggtggtgatggttttggcgttggcaatgaccgcgcggccctcttcaatggcactgcgcacctccaccgccgtggcttcaaaatttgaaagcgtgtttaccgccgttgtatgcagggtgtcttcccgaatcaaccggcccaccgtaccgcggccttgggcaatttggtccgaaatgctccgcaaattgccgatggtcaatgtcagtggctcgcggttttgcttgagaaaatccgttagcggccccaacaggttgtcaatgcgatcaccgctgaagctgcgggtgatgttttcaatgcctgccgccacgttgtccatcttggccatcatctcgctcaaatcggcgccctccactgtctcaataaattttccggcttccagcgggaggcctttttcagagccgaagtccaacgccacaaagttttggcccattaatccggcgaatttgatgcgggcctttgaatcggtgcgcaccaccacatcgcggcgcagaagcagtgtcacctgcaccatgttattggtcagaatcagccgctccacacgtcccacgggcacgccggccaatttcacagggtcgcccaccttgagttcgtggacgtttttgaagagggcatgcaagggataggttttgaggaaaaactccttgctgccggcgagttccaggatgatgacggccacgacgaccgccaaggctgcaaagatgcccaaccgggtttcaagtgtattgcgcataagcctcaagtttggggtttgaatcgaaagtccgtcgtcaaaaacttttgcacttcaggatcggcgcagcgccggacctctgccggcgtgcctatcgcccggagctgcccgcccaacaagatggccaacctgtccgcgatgccgaatgccaaatcacgatcgtgcgtaacgacgatggaagtagcccccatcctatcgttcaaccgcacaatctcctccgcaatcgtcactgcaatcagcgggtccagctcgctggtgggttcatcataaagtatgagctgcggctccaccaccaacgcccgcgcaatggccacgcgctttttcatgccgcccgagagttcgcccggcagcttgtcctccgtccccgccattcccaccaattcgagtttttcccgtacaatccgctgtatttccgccggtggtttgagccggtgctcgctcaagtacaaacccacattttcgcccacggtcaaagaattgagcaatgcgccgctttgaaacaccatcgccatgcggtagtggtccatgatttgaccgccatccaacggctgaccattaatgtggatttccccggcgtccggtgtctccaggccaatcaaatgccgcaagagcacgcttttgccgctgccgctcggccccatgatgacaaacaactccccgggcgccacctcaaaggtcagcccttgcaacaccgtctgcgaaccgtaagccttttgcagacccttgacggtcaccttgacccctgcgcgtttgttttcgggggtgttcattcttcaaaatacaacaaaagccgcgtcaggaaataatccagaattaaaatcaagacgatggaattgaccaccgccttggtcaccgagcggccaatgccccgcggaccgccaatggtcaccaacccctgatgacaggaaaccaatcccaccacgaccgcaaaacaaaaggtcttgaacaagccgtgcgccaaatctcccagctccaccacttcctcaagattattgaaatatgttgcaaaggaaatggcgatgctctggttgtaatgcgccaccaccgccccccccagccagccggtcaacaccgcaaacaacagcaacgtgggcagcgccaccgcaatggccgtcatccgcggcaagaccaaatagtggactggattgatgttgagcgtgcgcagggcgtccagctcctgataaactttcatcgagccgatttcagccgccatcgccgaaccaatgcgcccggcaatcaaaatggacatcatcacaggcgccagctccttgcacagactgatgcccacaactcccccaagcagaccgctcaatccccgctctgccaacaccggccccgtctgcaaagccagcacaccaccgatgaaaaaagacaggatgcacgccatcaacaaactggcgttgcctatctcaaacatctggtccatgaccttctggcgatggcgcagcaccaacggcagcgcctgcaaggtgcgccagaacaatatcagcatctcgcctatgttttgaaacatggtgccgtggccgctgcaggggacatacctgcggctccctctccataacgcggattctacaaaaattcaaaagtattttaacccggctcggatgaa

SEQ ID NO: 499 - DNA, 105045 bp, Artificial Sequence
  Synthetic Oligonucleotide
  misc_feature (1)..(89876): n is a, c, g, or t
nnnnnnnnnnnnnnnnnnnnnnnnnnnnnnnnnnnnnnnnnnnnnnnnnnnnnnnnnnnnnnnnnnnnnnnnnnnnnnnnnnnnnnnnnnnnnnnnnnnnnnnnnnnnnnnnnnnnnnnnnnnnnnnnnnnnnnnnnnnnnnnnnnnnnnnnnnnnnnnnnnnnnnnnnnnnnnnnnnnnnnnnnnnnnnnnnnnnnnnnnnnnnnnnnnnnnnnnnnnnnnnnnnnnnnnnnnnnnnnnnnnnnnnnnnnnnnnnnnnnnnnnnnnnnnnnnnnnnnnnnnnnnnnnnnnnnnnnnnnnnnnnnnnnnnnnnnnnnnnnnnnnnnnnnnnnnnnnnnnnnnnnnnnnnnnnnnnnnnnnnnnnnnnnnnnnnnnnnnnnnnnnnnnnnnnnnnnnnnnnnnnnnnnnnnnnnnnnnnnnnnnnnnnnnnnnnnnnnnnnnnnnnnnnnnnnnnnnnnnnnnnnnnnnnnnnnnnnnnnnnnnnnnnnnnnnnnnnnnnnnnnnnnnnnnnnnnnnnnnnnnnnnnnnnnnnnnnnnnnnnnnnnnnnnnnnnnnnnnnnnnnnnnnnnnnnnnnnnnnnnnnnnnnnnnnnnnnnnnnnnnnnnnnnnnnnnnnnnnnnnnnnnnnnnnnnnnnnnnnnnnnnnnnnnnnnnnnnnnnnnnnnnnnnnnnnnnnnnnnnnnnnnnnnnnnnnnnnnnnnnnnnnnnnnnnnnnnnnnnnnnnnnnnnnnnnnnnnnnnnnnnnnnnnnnnnnnnnnnnnnnnnnnnnnnnnnnnnnnnnnnnnnnnnnnnnnnnnnnnnnnnnnnnnnnnnnnnnnnnnnnnnnnnnnnnnnnnnnnnnnnnnnnnnnnnnnnnnnnnnnnnnnnnnnnnnnnnnnnnnnnnnnnnnnnnnnnnnnnnnnnnnnnnnnnnnnnnnnnnnnnnnnnnnnnnnnnnnnnnnnnnnnnnnnnnnnnnnnnnnnnnnnnnnnnnnnnnnnnnnnnnnnnnnnnnnnnnnnnnnnnnnnnnnnnnnnnnnnnnnnnnnnnnnnnnnnnnnnnnnnnnnnnnnnnnnnnnnnnnnnnnnnnnnnnnnnnnnnnnnnnnnnnnnnnnnnnnnnnnnnnnnnnnnnnnnnnnnnnnnnnnnnnnnnnnnnnnnnnnnnnnnnnnnnnnnnnnnnnnnnnnnnnnnnnnnnnnnnnnnnnnnnnnnnnnnnnnnnnnnnnnnnnnnnnnnnnnnnnnnnnnnnnnnnnnnnnnnnnnnnnnnnnnnnnnnnnnnnnnnnnnnnnnnnnnnnnnnnnnnnnnnnnnnnnnnnnnnnnnnnnnnnnnnnnnnnnnnnnnnnnnnnnnnnnnnnnnnnnnnnnnnnnnnnnnnnnnnnnnnnnnnnnnnnnnnnnnnnnnnnnnnnnnnnnnnnnnnnnnnnnnnnnnnnnnnnnnnnnnnnnnnnnnnnnnnnnnnnnnnnnnnnnnnnnnnnnnnnnnnnnnnnnnnnnnnnnnnnnnnnnnnnnnnnnnnnnnnnnnnnnnnnnnnnnnnnnnnnnnnnnnnnnnnnnnnnnnnnnnnnnnnnnnnnnnnnnnnnnnnnnnnnnnnnnnnnnnnnnnnnnnnnnnnnnnnnnnnnnnnnnnnnnnnnnnnnnnnnnnnnnnnnnnnnnnnnnnnnnnnnnnnnnnnnnnnnnnnnnnnnnnnnnnnnnnnnnnnnnnnnnnnnnnnnnnnnnnnnnnnnnnnnnnnnnnnnnnnnnnnnnnnnnnnnnnnnnnnnnnnnnnnnnnnnnnnnnnnnnnnnnnnnnnnnnnnnnnnnnnnnnnnnnnnnnnnnnnnnnnnnnnnnnnnnnnnnnnnnnnnnnnnnnnnnnnnnnnnnnnnnnnnnnnnnnnnnnnnnnnnnnnnnnnnnnnnnnnnnnnnnnnnnnnnnnnnnnnnnnnnnnnnnnnnnnnnnnnnnnnnnnnnnnnnnnnnnnnnnnnnnnnnnnnnnnnnnnnnnnnnnnnnnnnnnnnnnnnnnnnnnnnnnnnnnnnnnnnnnnnnnnnnnnnnnnnnnnnnnnnnnnnnnnnnnnnnnnnnnnnnnnnnnnnnnnnnnnnnnnnnnnnnnnnnnnnnnnnnnnnnnnnnnnnnnnnnnnnnnnnnnnnnnnnnnnnnnnnnnnnnnnnnnnnnnnnnnnnnnnnnnnnnnnnnnnnnnnnnnnnnnnnnnnnnnnnnnnnnnnnnnnnnnnnnnnnnnnnnnnnnnnnnnnnnnnnnnnnnnnnnnnnnnnnnnnnnnnnnnnnnnnnnnnnnnnnnnnnnnnnnnnnnnnnnnnnnnnnnnnnnnnnnnnnnnnnnnnnnnnnnnnnnnnnnnnnnnnnnnnnnnnnnnnnnnnnnnnnnnnnnnnnnnnnnnnnnnnnnnnnnnnnnnnnnnnnnnnnnnnnnnnnnnnnnnnnnnnnnnnnnnnnnnnnnnnnnnnnnnnnnnnnnnnnnnnnnnnnnnnnnnnnnnnnnnnnnnnnnnnnnnnnnnnnnnnnnnnnnnnnnnnnnnnnnnnnnnnnnnnnnnnnnnnnnnnnnnnnnnnnnnnnnnnnnnnnnnnnnnnnnnnnnnnnnnnnnnnnnnnnnnnnnnnnnnnnnnnnnnnnnnnnnnnnnnnnnnnnnnnnnnnnnnnnnnnnnnnnnnnnnnnnnnnnnnnnnnnnnnnnnnnnnnnnnnnnnnnnnnnnnnnnnnnnnnnnnnnnnnnnnnnnnnnnnnnnnnnnnnnnnnnnnnnnnnnnnnnnnnnnnnnnnnnnnnnnnnnnnnnnnnnnnnnnnnnnnnnnnnnnnnnnnnnnnnnnnnnnnnnnnnnnnnnnnnnnnnnnnnnnnnnnnnnnnnnnnnnnnnnnnnnnnnnnnnnnnnnnnnnnnnnnnnnnnnnnnnnnnnnnnnnnnnnnnnnnnnnnnnnnnnnnnnnnnnnnnnnnnnnnnnnnnnnnnnnnnnnnnnnnnnnnnnnnnnnnnnnnnnnnnnnnnnnnnnnnnnnnnnnnnnnnnnnnnnnnnnnnnnnnnnnnnnnnnnnnnnnnnnnnnnnnnnnnnnnnnnnnnnnnnnnnnnnnnnnnnnnnnnnnnnnnnnnnnnnnnnnnnnnnnnnnnnnnnnnnnnnnnnnnnnnnnnnnnnnnnnnnnnnnnnnnnnnnnnnnnnnnnnnnnnnnnnnnnnnnnnnnnnnnnnnnnnnnnnnnnnnnnnnnnnnnnnnnnnnnnnnnnnnnnnnnnnnnnnnnnnnnnnnnnnnnnnnnnnnnnnnnnnnnnnnnnnnnnnnnnnnnnnnnnnnnnnnnnnnnnnnnnnnnnnnnnnnnnnnnnnnnnnnnnnnnnnnnnnnnnnnnnnnnnnnnnnnnnnnnnnnnnnnnnnnnnnnnnnnnnnnnnnnnnnnnnnnnnnnnnnnnnnnnnnnnnnnnnnnnnnnnnnnnnnnnnnnnnnnnnnnnnnnnnnnnnnnnnnnnnnnnnnnnnnnnnnnnnnnnnnnnnnnnnnnnnnnnnnnnnnnnnnnnnnnnnnnnnnnnnnnnnnnnnnnnnnnnnnnnnnnnnnnnnnnnnnnnnnnnnnnnnnnnnnnnnnnnnnnnnnnnnnnnnnnnnnnnnnnnnnnnnnnnnnnnnnnnnnnnnnnnnnnnnnnnnnnnnnnnnnnnnnnnnnnnnnnnnnnnnnnnnnnnnnnnnnnnnnnnnnnnnnnnnnnnnnnnnnnnnnnnnnnnnnnnnnnnnnnnnnnnnnnnnnnnnnnnnnnnnnnnnnnnnnnnnnnnnnnnnnnnnnnnnnnnnnnnnnnnnnnnnnnnnnnnnnnnnnnnnnnnnnnnnnnnnnnnnnnnnnnnnnnnnnnnnnnnnnnnnnnnnnnnnnnnnnnnnnnnnnnnnnnnnnnnnnnnnnnnnnnnnnnnnnnnnnnnnnnnnnnnnnnnnnnnnnnnnnnnnnnnnnnnnnnnnnnnnnnnnnnnnnnnnnnnnnnnnnnnnnnnnnnnnnnnnnnnnnnnnnnnnnnnnnnnnnnnnnnnnnnnnnnnnnnnnnnnnnnnnnnnnnnnnnnnnnnnnnnnnnnnnnnnnnnnnnnnnnnnnnnnnnnnnnnnnnnnnnnnnnnnnnnnnnnnnnnnnnnnnnnnnnnnnnnnnnnnnnnnnnnnnnnnnnnnnnnnnnnnnnnnnnnnnnnnnnnnnnnnnnnnnnnnnnnnnnnnnnnnnnnnnnnnnnnnnnnnnnnnnnnnnnnnnnnnnnnnnnnnnnnnnnnnnnnnnnnnnnnnnnnnnnnnnnnnnnnnnnnnnnnnnnnnnnnnnnnnnnnnnnnnnnnnnnnnnnnnnnnnnnnnnnnnnnnnnnnnnnnnnnnnnnnnnnnnnnnnnnnnnnnnnnnnnnnnnnnnnnnnnnnnnnnnnnnnnnnnnnnnnnnnnnnnnnnnnnnnnnnnnnnnnnnnnnnnnnnnnnnnnnnnnnnnnnnnnnnnnnnnnnnnnnnnnnnnnnnnnnnnnnnnnnnnnnnnnnnnnnnnnnnnnnnnnnnnnnnnnnnnnnnnnnnnnnnnnnnnnnnnnnnnnnnnnnnnnnnnnnnnnnnnnnnnnnnnnnnnnnnnnnnnnnnnnnnnnnnnnnnnnnnnnnnnnnnnnnnnnnnnnnnnnnnnnnnnnnnnnnnnnnnnnnnnnnnnnnnnnnnnnnnnnnnnnnnnnnnnnnnnnnnnnnnnnnnnnnnnnnnnnnnnnnnnnnnnnnnnnnnnnnnnnnnnnnnnnnnnnnnnnnnnnnnnnnnnnnnnnnnnnnnnnnnnnnnnnnnnnnnnnnnnnnnnnnnnnnnnnnnnnnnnnnnnnnnnnnnnnnnnnnnnnnnnnnnnnnnnnnnnnnnnnnnnnnnnnnnnnnnnnnnnnnnnnnnnnnnnnnnnnnnnnnnnnnnnnnnnnnnnnnnnnnnnnnnnnnnnnnnnnnnnnnnnnnnnnnnnnnnnnnnnnnnnnnnnnnnnnnnnnnnnnnnnnnnnnnnnnnnnnnnnnnnnnnnnnnnnnnnnnnnnnnnnnnnnnnnnnnnnnnnnnnnnnnnnnnnnnnnnnnnnnnnnnnnnnnnnnnnnnnnnnnnnnnnnnnnnnnnnnnnnnnnnnnnnnnnnnnnnnnnnnnnnnnnnnnnnnnnnnnnnnnnnnnnnnnnnnnnnnnnnnnnnnnnnnnnnnnnnnnnnnnnnnnnnnnnnnnnnnnnnnnnnnnnnnnnnnnnnnnnnnnnnnnnnnnnnnnnnnnnnnnnnnnnnnnnnnnnnnnnnnnnnnnnnnnnnnnnnnnnnnnnnnnnnnnnnnnnnnnnnnnnnnnnnnnnnnnnnnnnnnnnnnnnnnnnnnnnnnnnnnnnnnnnnnnnnnnnnnnnnnnnnnnnnnnnnnnnnnnnnnnnnnnnnnnnnnnnnnnnnnnnnnnnnnnnnnnnnnnnnnnnnnnnnnnnnnnnnnnnnnnnnnnnnnnnnnnnnnnnnnnnnnnnnnnnnnnnnnnnnnnnnnnnnnnnnnnnnnnnnnnnnnnnnnnnnnnnnnnnnnnnnnnnnnnnnnnnnnnnnnnnnnnnnnnnnnnnnnnnnnnnnnnnnnnnnnnnnnnnnnnnnnnnnnnnnnnnnnnnnnnnnnnnnnnnnnnnnnnnnnnnnnnnnnnnnnnnnnnnnnnnnnnnnnnnnnnnnnnnnnnnnnnnnnnnnnnnnnnnnnnnnnnnnnnnnnnnnnnnnnnnnnnnnnnnnnnnnnnnnnnnnnnnnnnnnnnnnnnnnnnnnnnnnnnnnnnnnnnnnnnnnnnnnnnnnnnnnnnnnnnnnnnnnnnnnnnnnnnnnnnnnnnnnnnnnnnnnnnnnnnnnnnnnnnnnnnnnnnnnnnnnnnnnnnnnnnnnnnnnnnnnnnnnnnnnnnnnnnnnnnnnnnnnnnnnnnnnnnnnnnnnnnnnnnnnnnnnnnnnnnnnnnnnnnnnnnnnnnnnnnnnnnnnnnnnnnnnnnnnnnnnnnnnnnnnnnnnnnnnnnnnnnnnnnnnnnnnnnnnnnnnnnnnnnnnnnnnnnnnnnnnnnnnnnnnnnnnnnnnnnnnnnnnnnnnnnnnnnnnnnnnnnnnnnnnnnnnnnnnnnnnnnnnnnnnnnnnnnnnnnnnnnnnnnnnnnnnnnnnnnnnnnnnnnnnnnnnnnnnnnnnnnnnnnnnnnnnnnnnnnnnnnnnnnnnnnnnnnnnnnnnnnnnnnnnnnnnnnnnnnnnnnnnnnnnnnnnnnnnnnnnnnnnnnnnnnnnnnnnnnnnnnnnnnnnnnnnnnnnnnnnnnnnnnnnnnnnnnnnnnnnnnnnnnnnnnnnnnnnnnnnnnnnnnnnnnnnnnnnnnnnnnnnnnnnnnnnnnnnnnnnnnnnnnnnnnnnnnnnnnnnnnnnnnnnnnnnnnnnnnnnnnnnnnnnnnnnnnnnnnnnnnnnnnnnnnnnnnnnnnnnnnnnnnnnnnnnnnnnnnnnnnnnnnnnnnnnnnnnnnnnnnnnnnnnnnnnnnnnnnnnnnnnnnnnnnnnnnnnnnnnnnnnnnnnnnnnnnnnnnnnnnnnnnnnnnnnnnnnnnnnnnnnnnnnnnnnnnnnnnnnnnnnnnnnnnnnnnnnnnnnnnnnnnnnnnnnnnnnnnnnnnnnnnnnnnnnnnnnnnnnnnnnnnnnnnnnnnnnnnnnnnnnnnnnnnnnnnnnnnnnnnnnnnnnnnnnnnnnnnnnnnnnnnnnnnnnnnnnnnnnnnnnnnnnnnnnnnnnnnnnnnnnnnnnnnnnnnnnnnnnnnnnnnnnnnnnnnnnnnnnnnnnnnnnnnnnnnnnnnnnnnnnnnnnnnnnnnnnnnnnnnnnnnnnnnnnnnnnnnnnnnnnnnnnnnnnnnnnnnnnnnnnnnnnnnnnnnnnnnnnnnnnnnnnnnnnnnnnnnnnnnnnnnnnnnnnnnnnnnnnnnnnnnnnnnnnnnnnnnnnnnnnnnnnnnnnnnnnnnnnnnnnnnnnnnnnnnnnnnnnnnnnnnnnnnnnnnnnnnnnnnnnnnnnnnnnnnnnnnnnnnnnnnnnnnnnnnnnnnnnnnnnnnnnnnnnnnnnnnnnnnnnnnnnnnnnnnnnnnnnnnnnnnnnnnnnnnnnnnnnnnnnnnnnnnnnnnnnnnnnnnnnnnnnnnnnnnnnnnnnnnnnnnnnnnnnnnnnnnnnnnnnnnnnnnnnnnnnnnnnnnnnnnnnnnnnnnnnnnnnnnnnnnnnnnnnnnnnnnnnnnnnnnnnnnnnnnnnnnnnnnnnnnnnnnnnnnnnnnnnnnnnnnnnnnnnnnnnnnnnnnnnnnnnnnnnnnnnnnnnnnnnnnnnnnnnnnnnnnnnnnnnnnnnnnnnnnnnnnnnnnnnnnnnnnnnnnnnnnnnnnnnnnnnnnnnnnnnnnnnnnnnnnnnnnnnnnnnnnnnnnnnnnnnnnnnnnnnnnnnnnnnnnnnnnnnnnnnnnnnnnnnnnnnnnnnnnnnnnnnnnnnnnnnnnnnnnnnnnnnnnnnnnnnnnnnnnnnnnnnnnnnnnnnnnnnnnnnnnnnnnnnnnnnnnnnnnnnnnnnnnnnnnnnnnnnnnnnnnnnnnnnnnnnnnnnnnnnnnnnnnnnnnnnnnnnnnnnnnnnnnnnnnnnnnnnnnnnnnnnnnnnnnnnnnnnnnnnnnnnnnnnnnnnnnnnnnnnnnnnnnnnnnnnnnnnnnnnnnnnnnnnnnnnnnnnnnnnnnnnnnnnnnnnnnnnnnnnnnnnnnnnnnnnnnnnnnnnnnnnnnnnnnnnnnnnnnnnnnnnnnnnnnnnnnnnnnnnnnnnnnnnnnnnnnnnnnnnnnnnnnnnnnnnnnnnnnnnnnnnnnnnnnnnnnnnnnnnnnnnnnnnnnnnnnnnnnnnnnnnnnnnnnnnnnnnnnnnnnnnnnnnnnnnnnnnnnnnnnnnnnnnnnnnnnnnnnnnnnnnnnnnnnnnnnnnnnnnnnnnnnnnnnnnnnnnnnnnnnnnnnnnnnnnnnnnnnnnnnnnnnnnnnnnnnnnnnnnnnnnnnnnnnnnnnnnnnnnnnnnnnnnnnnnnnnnnnnnnnnnnnnnnnnnnnnnnnnnnnnnnnnnnnnnnnnnnnnnnnnnnnnnnnnnnnnnnnnnnnnnnnnnnnnnnnnnnnnnnnnnnnnnnnnnnnnnnnnnnnnnnnnnnnnnnnnnnnnnnnnnnnnnnnnnnnnnnnnnnnnnnnnnnnnnnnnnnnnnnnnnnnnnnnnnnnnnnnnnnnnnnnnnnnnnnnnnnnnnnnnnnnnnnnnnnnnnnnnnnnnnnnnnnnnnnnnnnnnnnnnnnnnnnnnnnnnnnnnnnnnnnnnnnnnnnnnnnnnnnnnnnnnnnnnnnnnnnnnnnnnnnnnnnnnnnnnnnnnnnnnnnnnnnnnnnnnnnnnnnnnnnnnnnnnnnnnnnnnnnnnnnnnnnnnnnnnnnnnnnnnnnnnnnnnnnnnnnnnnnnnnnnnnnnnnnnnnnnnnnnnnnnnnnnnnnnnnnnnnnnnnnnnnnnnnnnnnnnnnnnnnnnnnnnnnnnnnnnnnnnnnnnnnnnnnnnnnnnnnnnnnnnnnnnnnnnnnnnnnnnnnnnnnnnnnnnnnnnnnnnnnnnnnnnnnnnnnnnnnnnnnnnnnnnnnnnnnnnnnnnnnnnnnnnnnnnnnnnnnnnnnnnnnnnnnnnnnnnnnnnnnnnnnnnnnnnnnnnnnnnnnnnnnnnnnnnnnnnnnnnnnnnnnnnnnnnnnnnnnnnnnnnnnnnnnnnnnnnnnnnnnnnnnnnnnnnnnnnnnnnnnnnnnnnnnnnnnnnnnnnnnnnnnnnnnnnnnnnnnnnnnnnnnnnnnnnnnnnnnnnnnnnnnnnnnnnnnnnnnnnnnnnnnnnnnnnnnnnnnnnnnnnnnnnnnnnnnnnnnnnnnnnnnnnnnnnnnnnnnnnnnnnnnnnnnnnnnnnnnnnnnnnnnnnnnnnnnnnnnnnnnnnnnnnnnnnnnnnnnnnnnnnnnnnnnnnnnnnnnnnnnnnnnnnnnnnnnnnnnnnnnnnnnnnnnnnnnnnnnnnnnnnnnnnnnnnnnnnnnnnnnnnnnnnnnnnnnnnnnnnnnnnnnnnnnnnnnnnnnnnnnnnnnnnnnnnnnnnnnnnnnnnnnnnnnnnnnnnnnnnnnnnnnnnnnnnnnnnnnnnnnnnnnnnnnnnnnnnnnnnnnnnnnnnnnnnnnnnnnnnnnnnnnnnnnnnnnnnnnnnnnnnnnnnnnnnnnnnnnnnnnnnnnnnnnnnnnnnnnnnnnnnnnnnnnnnnnnnnnnnnnnnnnnnnnnnnnnnnnnnnnnnnnnnnnnnnnnnnnnnnnnnnnnnnnnnnnnnnnnnnnnnnnnnnnnnnnnnnnnnnnnnnnnnnnnnnnnnnnnnnnnnnnnnnnnnnnnnnnnnnnnnnnnnnnnnnnnnnnnnnnnnnnnnnnnnnnnnnnnnnnnnnnnnnnnnnnnnnnnnnnnnnnnnnnnnnnnnnnnnnnnnnnnnnnnnnnnnnnnnnnnnnnnnnnnnnnnnnnnnnnnnnnnnnnnnnnnnnnnnnnnnnnnnnnnnnnnnnnnnnnnnnnnnnnnnnnnnnnnnnnnnnnnnnnnnnnnnnnnnnnnnnnnnnnnnnnnnnnnnnnnnnnnnnnnnnnnnnnnnnnnnnnnnnnnnnnnnnnnnnnnnnnnnnnnnnnnnnnnnnnnnnnnnnnnnnnnnnnnnnnnnnnnnnnnnnnnnnnnnnnnnnnnnnnnnnnnnnnnnnnnnnnnnnnnnnnnnnnnnnnnnnnnnnnnnnnnnnnnnnnnnnnnnnnnnnnnnnnnnnnnnnnnnnnnnnnnnnnnnnnnnnnnnnnnnnnnnnnnnnnnnnnnnnnnnnnnnnnnnnnnnnnnnnnnnnnnnnnnnnnnnnnnnnnnnnnnnnnnnnnnnnnnnnnnnnnnnnnnnnnnnnnnnnnnnnnnnnnnnnnnnnnnnnnnnnnnnnnnnnnnnnnnnnnnnnnnnnnnnnnnnnnnnnnnnnnnnnnnnnnnnnnnnnnnnnnnnnnnnnnnnnnnnnnnnnnnnnnnnnnnnnnnnnnnnnnnnnnnnnnnnnnnnnnnnnnnnnnnnnnnnnnnnnnnnnnnnnnnnnnnnnnnnnnnnnnnnnnnnnnnnnnnnnnnnnnnnnnnnnnnnnnnnnnnnnnnnnnnnnnnnnnnnnnnnnnnnnnnnnnnnnnnnnnnnnnnnnnnnnnnnnnnnnnnnnnnnnnnnnnnnnnnnnnnnnnnnnnnnnnnnnnnnnnnnnnnnnnnnnnnnnnnnnnnnnnnnnnnnnnnnnnnnnnnnnnnnnnnnnnnnnnnnnnnnnnnnnnnnnnnnnnnnnnnnnnnnnnnnnnnnnnnnnnnnnnnnnnnnnnnnnnnnnnnnnnnnnnnnnnnnnnnnnnnnnnnnnnnnnnnnnnnnnnnnnnnnnnnnnnnnnnnnnnnnnnnnnnnnnnnnnnnnnnnnnnnnnnnnnnnnnnnnnnnnnnnnnnnnnnnnnnnnnnnnnnnnnnnnnnnnnnnnnnnnnnnnnnnnnnnnnnnnnnnnnnnnnnnnnnnnnnnnnnnnnnnnnnnnnnnnnnnnnnnnnnnnnnnnnnnnnnnnnnnnnnnnnnnnnnnnnnnnnnnnnnnnnnnnnnnnnnnnnnnnnnnnnnnnnnnnnnnnnnnnnnnnnnnnnnnnnnnnnnnnnnnnnnnnnnnnnnnnnnnnnnnnnnnnnnnnnnnnnnnnnnnnnnnnnnnnnnnnnnnnnnnnnnnnnnnnnnnnnnnnnnnnnnnnnnnnnnnnnnnnnnnnnnnnnnnnnnnnnnnnnnnnnnnnnnnnnnnnnnnnnnnnnnnnnnnnnnnnnnnnnnnnnnnnnnnnnnnnnnnnnnnnnnnnnnnnnnnnnnnnnnnnnnnnnnnnnnnnnnnnnnnnnnnnnnnnnnnnnnnnnnnnnnnnnnnnnnnnnnnnnnnnnnnnnnnnnnnnnnnnnnnnnnnnnnnnnnnnnnnnnnnnnnnnnnnnnnnnnnnnnnnnnnnnnnnnnnnnnnnnnnnnnnnnnnnnnnnnnnnnnnnnnnnnnnnnnnnnnnnnnnnnnnnnnnnnnnnnnnnnnnnnnnnnnnnnnnnnnnnnnnnnnnnnnnnnnnnnnnnnnnnnnnnnnnnnnnnnnnnnnnnnnnnnnnnnnnnnnnnnnnnnnnnnnnnnnnnnnnnnnnnnnnnnnnnnnnnnnnnnnnnnnnnnnnnnnnnnnnnnnnnnnnnnnnnnnnnnnnnnnnnnnnnnnnnnnnnnnnnnnnnnnnnnnnnnnnnnnnnnnnnnnnnnnnnnnnnnnnnnnnnnnnnnnnnnnnnnnnnnnnnnnnnnnnnnnnnnnnnnnnnnnnnnnnnnnnnnnnnnnnnnnnnnnnnnnnnnnnnnnnnnnnnnnnnnnnnnnnnnnnnnnnnnnnnnnnnnnnnnnnnnnnnnnnnnnnnnnnnnnnnnnnnnnnnnnnnnnnnnnnnnnnnnnnnnnnnnnnnnnnnnnnnnnnnnnnnnnnnnnnnnnnnnnnnnnnnnnnnnnnnnnnnnnnnnnnnnnnnnnnnnnnnnnnnnnnnnnnnnnnnnnnnnnnnnnnnnnnnnnnnnnnnnnnnnnnnnnnnnnnnnnnnnnnnnnnnnnnnnnnnnnnnnnnnnnnnnnnnnnnnnnnnnnnnnnnnnnnnnnnnnnnnnnnnnnnnnnnnnnnnnnnnnnnnnnnnnnnnnnnnnnnnnnnnnnnnnnnnnnnnnnnnnnnnnnnnnnnnnnnnnnnnnnnnnnnnnnnnnnnnnnnnnnnnnnnnnnnnnnnnnnnnnnnnnnnnnnnnnnnnnnnnnnnnnnnnnnnnnnnnnnnnnnnnnnnnnnnnnnnnnnnnnnnnnnnnnnnnnnnnnnnnnnnnnnnnnnnnnnnnnnnnnnnnnnnnnnnnnnnnnnnnnnnnnnnnnnnnnnnnnnnnnnnnnnnnnnnnnnnnnnnnnnnnnnnnnnnnnnnnnnnnnnnnnnnnnnnnnnnnnnnnnnnnnnnnnnnnnnnnnnnnnnnnnnnnnnnnnnnnnnnnnnnnnnnnnnnnnnnnnnnnnnnnnnnnnnnnnnnnnnnnnnnnnnnnnnnnnnnnnnnnnnnnnnnnnnnnnnnnnnnnnnnnnnnnnnnnnnnnnnnnnnnnnnnnnnnnnnnnnnnnnnnnnnnnnnnnnnnnnnnnnnnnnnnnnnnnnnnnnnnnnnnnnnnnnnnnnnnnnnnnnnnnnnnnnnnnnnnnnnnnnnnnnnnnnnnnnnnnnnnnnnnnnnnnnnnnnnnnnnnnnnnnnnnnnnnnnnnnnnnnnnnnnnnnnnnnnnnnnnnnnnnnnnnnnnnnnnnnnnnnnnnnnnnnnnnnnnnnnnnnnnnnnnnnnnnnnnnnnnnnnnnnnnnnnnnnnnnnnnnnnnnnnnnnnnnnnnnnnnnnnnnnnnnnnnnnnnnnnnnnnnnnnnnnnnnnnnnnnnnnnnnnnnnnnnnnnnnnnnnnnnnnnnnnnnnnnnnnnnnnnnnnnnnnnnnnnnnnnnnnnnnnnnnnnnnnnnnnnnnnnnnnnnnnnnnnnnnnnnnnnnnnnnnnnnnnnnnnnnnnnnnnnnnnnnnnnnnnnnnnnnnnnnnnnnnnnnnnnnnnnnnnnnnnnnnnnnnnnnnnnnnnnnnnnnnnnnnnnnnnnnnnnnnnnnnnnnnnnnnnnnnnnnnnnnnnnnnnnnnnnnnnnnnnnnnnnnnnnnnnnnnnnnnnnnnnnnnnnnnnnnnnnnnnnnnnnnnnnnnnnnnnnnnnnnnnnnnnnnnnnnnnnnnnnnnnnnnnnnnnnnnnnnnnnnnnnnnnnnnnnnnnnnnnnnnnnnnnnnnnnnnnnnnnnnnnnnnnnnnnnnnnnnnnnnnnnnnnnnnnnnnnnnnnnnnnnnnnnnnnnnnnnnnnnnnnnnnnnnnnnnnnnnnnnnnnnnnnnnnnnnnnnnnnnnnnnnnnnnnnnnnnnnnnnnnnnnnnnnnnnnnnnnnnnnnnnnnnnnnnnnnnnnnnnnnnnnnnnnnnnnnnnnnnnnnnnnnnnnnnnnnnnnnnnnnnnnnnnnnnnnnnnnnnnnnnnnnnnnnnnnnnnnnnnnnnnnnnnnnnnnnnnnnnnnnnnnnnnnnnnnnnnnnnnnnnnnnnnnnnnnnnnnnnnnnnnnnnnnnnnnnnnnnnnnnnnnnnnnnnnnnnnnnnnnnnnnnnnnnnnnnnnnnnnnnnnnnnnnnnnnnnnnnnnnnnnnnnnnnnnnnnnnnnnnnnnnnnnnnnnnnnnnnnnnnnnnnnnnnnnnnnnnnnnnnnnnnnnnnnnnnnnnnnnnnnnnnnnnnnnnnnnnnnnnnnnnnnnnnnnnnnnnnnnnnnnnnnnnnnnnnnnnnnnnnnnnnnnnnnnnnnnnnnnnnnnnnnnnnnnnnnnnnnnnnnnnnnnnnnnnnnnnnnnnnnnnnnnnnnnnnnnnnnnnnnnnnnnnnnnnnnnnnnnnnnnnnnnnnnnnnnnnnnnnnnnnnnnnnnnnnnnnnnnnnnnnnnnnnnnnnnnnnnnnnnnnnnnnnnnnnnnnnnnnnnnnnnnnnnnnnnnnnnnnnnnnnnnnnnnnnnnnnnnnnnnnnnnnnnnnnnnnnnnnnnnnnnnnnnnnnnnnnnnnnnnnnnnnnnnnnnnnnnnnnnnnnnnnnnnnnnnnnnnnnnnnnnnnnnnnnnnnnnnnnnnnnnnnnnnnnnnnnnnnnnnnnnnnnnnnnnnnnnnnnnnnnnnnnnnnnnnnnnnnnnnnnnnnnnnnnnnnnnnnnnnnnnnnnnnnnnnnnnnnnnnnnnnnnnnnnnnnnnnnnnnnnnnnnnnnnnnnnnnnnnnnnnnnnnnnnnnnnnnnnnnnnnnnnnnnnnnnnnnnnnnnnnnnnnnnnnnnnnnnnnnnnnnnnnnnnnnnnnnnnnnnnnnnnnnnnnnnnnnnnnnnnnnnnnnnnnnnnnnnnnnnnnnnnnnnnnnnnnnnnnnnnnnnnnnnnnnnnnnnnnnnnnnnnnnnnnnnnnnnnnnnnnnnnnnnnnnnnnnnnnnnnnnnnnnnnnnnnnnnnnnnnnnnnnnnnnnnnnnnnnnnnnnnnnnnnnnnnnnnnnnnnnnnnnnnnnnnnnnnnnnnnnnnnnnnnnnnnnnnnnnnnnnnnnnnnnnnnnnnnnnnnnnnnnnnnnnnnnnnnnnnnnnnnnnnnnnnnnnnnnnnnnnnnnnnnnnnnnnnnnnnnnnnnnnnnnnnnnnnnnnnnnnnnnnnnnnnnnnnnnnnnnnnnnnnnnnnnnnnnnnnnnnnnnnnnnnnnnnnnnnnnnnnnnnnnnnnnnnnnnnnnnnnnnnnnnnnnnnnnnnnnnnnnnnnnnnnnnnnnnnnnnnnnnnnnnnnnnnnnnnnnnnnnnnnnnnnnnnnnnnnnnnnnnnnnnnnnnnnnnnnnnnnnnnnnnnnnnnnnnnnnnnnnnnnnnnnnnnnnnnnnnnnnnnnnnnnnnnnnnnnnnnnnnnnnnnnnnnnnnnnnnnnnnnnnnnnnnnnnnnnnnnnnnnnnnnnnnnnnnnnnnnnnnnnnnnnnnnnnnnnnnnnnnnnnnnnnnnnnnnnnnnnnnnnnnnnnnnnnnnnnnnnnnnnnnnnnnnnnnnnnnnnnnnnnnnnnnnnnnnnnnnnnnnnnnnnnnnnnnnnnnnnnnnnnnnnnnnnnnnnnnnnnnnnnnnnnnnnnnnnnnnnnnnnnnnnnnnnnnnnnnnnnnnnnnnnnnnnnnnnnnnnnnnnnnnnnnnnnnnnnnnnnnnnnnnnnnnnnnnnnnnnnnnnnnnnnnnnnnnnnnnnnnnnnnnnnnnnnnnnnnnnnnnnnnnnnnnnnnnnnnnnnnnnnnnnnnnnnnnnnnnnnnnnnnnnnnnnnnnnnnnnnnnnnnnnnnnnnnnnnnnnnnnnnnnnnnnnnnnnnnnnnnnnnnnnnnnnnnnnnnnnnnnnnnnnnnnnnnnnnnnnnnnnnnnnnnnnnnnnnnnnnnnnnnnnnnnnnnnnnnnnnnnnnnnnnnnnnnnnnnnnnnnnnnnnnnnnnnnnnnnnnnnnnnnnnnnnnnnnnnnnnnnnnnnnnnnnnnnnnnnnnnnnnnnnnnnnnnnnnnnnnnnnnnnnnnnnnnnnnnnnnnnnnnnnnnnnnnnnnnnnnnnnnnnnnnnnnnnnnnnnnnnnnnnnnnnnnnnnnnnnnnnnnnnnnnnnnnnnnnnnnnnnnnnnnnnnnnnnnnnnnnnnnnnnnnnnnnnnnnnnnnnnnnnnnnnnnnnnnnnnnnnnnnnnnnnnnnnnnnnnnnnnnnnnnnnnnnnnnnnnnnnnnnnnnnnnnnnnnnnnnnnnnnnnnnnnnnnnnnnnnnnnnnnnnnnnnnnnnnnnnnnnnnnnnnnnnnnnnnnnnnnnnnnnnnnnnnnnnnnnnnnnnnnnnnnnnnnnnnnnnnnnnnnnnnnnnnnnnnnnnnnnnnnnnnnnnnnnnnnnnnnnnnnnnnnnnnnnnnnnnnnnnnnnnnnnnnnnnnnnnnnnnnnnnnnnnnnnnnnnnnnnnnnnnnnnnnnnnnnnnnnnnnnnnnnnnnnnnnnnnnnnnnnnnnnnnnnnnnnnnnnnnnnnnnnnnnnnnnnnnnnnnnnnnnnnnnnnnnnnnnnnnnnnnnnnnnnnnnnnnnnnnnnnnnnnnnnnnnnnnnnnnnnnnnnnnnnnnnnnnnnnnnnnnnnnnnnnnnnnnnnnnnnnnnnnnnnnnnnnnnnnnnnnnnnnnnnnnnnnnnnnnnnnnnnnnnnnnnnnnnnnnnnnnnnnnnnnnnnnnnnnnnnnnnnnnnnnnnnnnnnnnnnnnnnnnnnnnnnnnnnnnnnnnnnnnnnnnnnnnnnnnnnnnnnnnnnnnnnnnnnnnnnnnnnnnnnnnnnnnnnnnnnnnnnnnnnnnnnnnnnnnnnnnnnnnnnnnnnnnnnnnnnnnnnnnnnnnnnnnnnnnnnnnnnnnnnnnnnnnnnnnnnnnnnnnnnnnnnnnnnnnnnnnnnnnnnnnnnnnnnnnnnnnnnnnnnnnnnnnnnnnnnnnnnnnnnnnnnnnnnnnnnnnnnnnnnnnnnnnnnnnnnnnnnnnnnnnnnnnnnnnnnnnnnnnnnnnnnnnnnnnnnnnnnnnnnnnnnnnnnnnnnnnnnnnnnnnnnnnnnnnnnnnnnnnnnnnnnnnnnnnnnnnnnnnnnnnnnnnnnnnnnnnnnnnnnnnnnnnnnnnnnnnnnnnnnnnnnnnnnnnnnnnnnnnnnnnnnnnnnnnnnnnnnnnnnnnnnnnnnnnnnnnnnnnnnnnnnnnnnnnnnnnnnnnnnnnnnnnnnnnnnnnnnnnnnnnnnnnnnnnnnnnnnnnnnnnnnnnnnnnnnnnnnnnnnnnnnnnnnnnnnnnnnnnnnnnnnnnnnnnnnnnnnnnnnnnnnnnnnnnnnnnnnnnnnnnnnnnnnnnnnnnnnnnnnnnnnnnnnnnnnnnnnnnnnnnnnnnnnnnnnnnnnnnnnnnnnnnnnnnnnnnnnnnnnnnnnnnnnnnnnnnnnnnnnnnnnnnnnnnnnnnnnnnnnnnnnnnnnnnnnnnnnnnnnnnnnnnnnnnnnnnnnnnnnnnnnnnnnnnnnnnnnnnnnnnnnnnnnnnnnnnnnnnnnnnnnnnnnnnnnnnnnnnnnnnnnnnnnnnnnnnnnnnnnnnnnnnnnnnnnnnnnnnnnnnnnnnnnnnnnnnnnnnnnnnnnnnnnnnnnnnnnnnnnnnnnnnnnnnnnnnnnnnnnnnnnnnnnnnnnnnnnnnnnnnnnnnnnnnnnnnnnnnnnnnnnnnnnnnnnnnnnnnnnnnnnnnnnnnnnnnnnnnnnnnnnnnnnnnnnnnnnnnnnnnnnnnnnnnnnnnnnnnnnnnnnnnnnnnnnnnnnnnnnnnnnnnnnnnnnnnnnnnnnnnnnnnnnnnnnnnnnnnnnnnnnnnnnnnnnnnnnnnnnnnnnnnnnnnnnnnnnnnnnnnnnnnnnnnnnnnnnnnnnnnnnnnnnnnnnnnnnnnnnnnnnnnnnnnnnnnnnnnnnnnnnnnnnnnnnnnnnnnnnnnnnnnnnnnnnnnnnnnnnnnnnnnnnnnnnnnnnnnnnnnnnnnnnnnnnnnnnnnnnnnnnnnnnnnnnnnnnnnnnnnnnnnnnnnnnnnnnnnnnnnnnnnnnnnnnnnnnnnnnnnnnnnnnnnnnnnnnnnnnnnnnnnnnnnnnnnnnnnnnnnnnnnnnnnnnnnnnnnnnnnnnnnnnnnnnnnnnnnnnnnnnnnnnnnnnnnnnnnnnnnnnnnnnnnnnnnnnnnnnnnnnnnnnnnnnnnnnnnnnnnnnnnnnnnnnnnnnnnnnnnnnnnnnnnnnnnnnnnnnnnnnnnnnnnnnnnnnnnnnnnnnnnnnnnnnnnnnnnnnnnnnnnnnnnnnnnnnnnnnnnnnnnnnnnnnnnnnnnnnnnnnnnnnnnnnnnnnnnnnnnnnnnnnnnnnnnnnnnnnnnnnnnnnnnnnnnnnnnnnnnnnnnnnnnnnnnnnnnnnnnnnnnnnnnnnnnnnnnnnnnnnnnnnnnnnnnnnnnnnnnnnnnnnnnnnnnnnnnnnnnnnnnnnnnnnnnnnnnnnnnnnnnnnnnnnnnnnnnnnnnnnnnnnnnnnnnnnnnnnnnnnnnnnnnnnnnnnnnnnnnnnnnnnnnnnnnnnnnnnnnnnnnnnnnnnnnnnnnnnnnnnnnnnnnnnnnnnnnnnnnnnnnnnnnnnnnnnnnnnnnnnnnnnnnnnnnnnnnnnnnnnnnnnnnnnnnnnnnnnnnnnnnnnnnnnnnnnnnnnnnnnnnnnnnnnnnnnnnnnnnnnnnnnnnnnnnnnnnnnnnnnnnnnnnnnnnnnnnnnnnnnnnnnnnnnnnnnnnnnnnnnnnnnnnnnnnnnnnnnnnnnnnnnnnnnnnnnnnnnnnnnnnnnnnnnnnnnnnnnnnnnnnnnnnnnnnnnnnnnnnnnnnnnnnnnnnnnnnnnnnnnnnnnnnnnnnnnnnnnnnnnnnnnnnnnnnnnnnnnnnnnnnnnnnnnnnnnnnnnnnnnnnnnnnnnnnnnnnnnnnnnnnnnnnnnnnnnnnnnnnnnnnnnnnnnnnnnnnnnnnnnnnnnnnnnnnnnnnnnnnnnnnnnnnnnnnnnnnnnnnnnnnnnnnnnnnnnnnnnnnnnnnnnnnnnnnnnnnnnnnnnnnnnnnnnnnnnnnnnnnnnnnnnnnnnnnnnnnnnnnnnnnnnnnnnnnnnnnnnnnnnnnnnnnnnnnnnnnnnnnnnnnnnnnnnnnnnnnnnnnnnnnnnnnnnnnnnnnnnnnnnnnnnnnnnnnnnnnnnnnnnnnnnnnnnnnnnnnnnnnnnnnnnnnnnnnnnnnnnnnnnnnnnnnnnnnnnnnnnnnnnnnnnnnnnnnnnnnnnnnnnnnnnnnnnnnnnnnnnnnnnnnnnnnnnnnnnnnnnnnnnnnnnnnnnnnnnnnnnnnnnnnnnnnnnnnnnnnnnnnnnnnnnnnnnnnnnnnnnnnnnnnnnnnnnnnnnnnnnnnnnnnnnnnnnnnnnnnnnnnnnnnnnnnnnnnnnnnnnnnnnnnnnnnnnnnnnnnnnnnnnnnnnnnnnnnnnnnnnnnnnnnnnnnnnnnnnnnnnnnnnnnnnnnnnnnnnnnnnnnnnnnnnnnnnnnnnnnnnnnnnnnnnnnnnnnnnnnnnnnnnnnnnnnnnnnnnnnnnnnnnnnnnnnnnnnnnnnnnnnnnnnnnnnnnnnnnnnnnnnnnnnnnnnnnnnnnnnnnnnnnnnnnnnnnnnnnnnnnnnnnnnnnnnnnnnnnnnnnnnnnnnnnnnnnnnnnnnnnnnnnnnnnnnnnnnnnnnnnnnnnnnnnnnnnnnnnnnnnnnnnnnnnnnnnnnnnnnnnnnnnnnnnnnnnnnnnnnnnnnnnnnnnnnnnnnnnnnnnnnnnnnnnnnnnnnnnnnnnnnnnnnnnnnnnnnnnnnnnnnnnnnnnnnnnnnnnnnnnnnnnnnnnnnnnnnnnnnnnnnnnnnnnnnnnnnnnnnnnnnnnnnnnnnnnnnnnnnnnnnnnnnnnnnnnnnnnnnnnnnnnnnnnnnnnnnnnnnnnnnnnnnnnnnnnnnnnnnnnnnnnnnnnnnnnnnnnnnnnnnnnnnnnnnnnnnnnnnnnnnnnnnnnnnnnnnnnnnnnnnnnnnnnnnnnnnnnnnnnnnnnnnnnnnnnnnnnnnnnnnnnnnnnnnnnnnnnnnnnnnnnnnnnnnnnnnnnnnnnnnnnnnnnnnnnnnnnnnnnnnnnnnnnnnnnnnnnnnnnnnnnnnnnnnnnnnnnnnnnnnnnnnnnnnnnnnnnnnnnnnnnnnnnnnnnnnnnnnnnnnnnnnnnnnnnnnnnnnnnnnnnnnnnnnnnnnnnnnnnnnnnnnnnnnnnnnnnnnnnnnnnnnnnnnnnnnnnnnnnnnnnnnnnnnnnnnnnnnnnnnnnnnnnnnnnnnnnnnnnnnnnnnnnnnnnnnnnnnnnnnnnnnnnnnnnnnnnnnnnnnnnnnnnnnnnnnnnnnnnnnnnnnnnnnnnnnnnnnnnnnnnnnnnnnnnnnnnnnnnnnnnnnnnnnnnnnnnnnnnnnnnnnnnnnnnnnnnnnnnnnnnnnnnnnnnnnnnnnnnnnnnnnnnnnnnnnnnnnnnnnnnnnnnnnnnnnnnnnnnnnnnnnnnnnnnnnnnnnnnnnnnnnnnnnnnnnnnnnnnnnnnnnnnnnnnnnnnnnnnnnnnnnnnnnnnnnnnnnnnnnnnnnnnnnnnnnnnnnnnnnnnnnnnnnnnnnnnnnnnnnnnnnnnnnnnnnnnnnnnnnnnnnnnnnnnnnnnnnnnnnnnnnnnnnnnnnnnnnnnnnnnnnnnnnnnnnnnnnnnnnnnnnnnnnnnnnnnnnnnnnnnnnnnnnnnnnnnnnnnnnnnnnnnnnnnnnnnnnnnnnnnnnnnnnnnnnnnnnnnnnnnnnnnnnnnnnnnnnnnnnnnnnnnnnnnnnnnnnnnnnnnnnnnnnnnnnnnnnnnnnnnnnnnnnnnnnnnnnnnnnnnnnnnnnnnnnnnnnnnnnnnnnnnnnnnnnnnnnnnnnnnnnnnnnnnnnnnnnnnnnnnnnnnnnnnnnnnnnnnnnnnnnnnnnnnnnnnnnnnnnnnnnnnnnnnnnnnnnnnnnnnnnnnnnnnnnnnnnnnnnnnnnnnnnnnnnnnnnnnnnnnnnnnnnnnnnnnnnnnnnnnnnnnnnnnnnnnnnnnnnnnnnnnnnnnnnnnnnnnnnnnnnnnnnnnnnnnnnnnnnnnnnnnnnnnnnnnnnnnnnnnnnnnnnnnnnnnnnnnnnnnnnnnnnnnnnnnnnnnnnnnnnnnnnnnnnnnnnnnnnnnnnnnnnnnnnnnnnnnnnnnnnnnnnnnnnnnnnnnnnnnnnnnnnnnnnnnnnnnnnnnnnnnnnnnnnnnnnnnnnnnnnnnnnnnnnnnnnnnnnnnnnnnnnnnnnnnnnnnnnnnnnnnnnnnnnnnnnnnnnnnnnnnnnnnnnnnnnnnnnnnnnnnnnnnnnnnnnnnnnnnnnnnnnnnnnnnnnnnnnnnnnnnnnnnnnnnnnnnnnnnnnnnnnnnnnnnnnnnnnnnnnnnnnnnnnnnnnnnnnnnnnnnnnnnnnnnnnnnnnnnnnnnnnnnnnnnnnnnnnnnnnnnnnnnnnnnnnnnnnnnnnnnnnnnnnnnnnnnnnnnnnnnnnnnnnnnnnnnnnnnnnnnnnnnnnnnnnnnnnnnnnnnnnnnnnnnnnnnnnnnnnnnnnnnnnnnnnnnnnnnnnnnnnnnnnnnnnnnnnnnnnnnnnnnnnnnnnnnnnnnnnnnnnnnnnnnnnnnnnnnnnnnnnnnnnnnnnnnnnnnnnnnnnnnnnnnnnnnnnnnnnnnnnnnnnnnnnnnnnnnnnnnnnnnnnnnnnnnnnnnnnnnnnnnnnnnnnnnnnnnnnnnnnnnnnnnnnnnnnnnnnnnnnnnnnnnnnnnnnnnnnnnnnnnnnnnnnnnnnnnnnnnnnnnnnnnnnnnnnnnnnnnnnnnnnnnnnnnnnnnnnnnnnnnnnnnnnnnnnnnnnnnnnnnnnnnnnnnnnnnnnnnnnnnnnnnnnnnnnnnnnnnnnnnnnnnnnnnnnnnnnnnnnnnnnnnnnnnnnnnnnnnnnnnnnnnnnnnnnnnnnnnnnnnnnnnnnnnnnnnnnnnnnnnnnnnnnnnnnnnnnnnnnnnnnnnnnnnnnnnnnnnnnnnnnnnnnnnnnnnnnnnnnnnnnnnnnnnnnnnnnnnnnnnnnnnnnnnnnnnnnnnnnnnnnnnnnnnnnnnnnnnnnnnnnnnnnnnnnnnnnnnnnnnnnnnnnnnnnnnnnnnnnnnnnnnnnnnnnnnnnnnnnnnnnnnnnnnnnnnnnnnnnnnnnnnnnnnnnnnnnnnnnnnnnnnnnnnnnnnnnnnnnnnnnnnnnnnnnnnnnnnnnnnnnnnnnnnnnnnnnnnnnnnnnnnnnnnnnnnnnnnnnnnnnnnnnnnnnnnnnnnnnnnnnnnnnnnnnnnnnnnnnnnnnnnnnnnnnnnnnnnnnnnnnnnnnnnnnnnnnnnnnnnnnnnnnnnnnnnnnnnnnnnnnnnnnnnnnnnnnnnnnnnnnnnnnnnnnnnnnnnnnnnnnnnnnnnnnnnnnnnnnnnnnnnnnnnnnnnnnnnnnnnnnnnnnnnnnnnnnnnnnnnnnnnnnnnnnnnnnnnnnnnnnnnnnnnnnnnnnnnnnnnnnnnnnnnnnnnnnnnnnnnnnnnnnnnnnnnnnnnnnnnnnnnnnnnnnnnnnnnnnnnnnnnnnnnnnnnnnnnnnnnnnnnnnnnnnnnnnnnnnnnnnnnnnnnnnnnnnnnnnnnnnnnnnnnnnnnnnnnnnnnnnnnnnnnnnnnnnnnnnnnnnnnnnnnnnnnnnnnnnnnnnnnnnnnnnnnnnnnnnnnnnnnnnnnnnnnnnnnnnnnnnnnnnnnnnnnnnnnnnnnnnnnnnnnnnnnnnnnnnnnnnnnnnnnnnnnnnnnnnnnnnnnnnnnnnnnnnnnnnnnnnnnnnnnnnnnnnnnnnnnnnnnnnnnnnnnnnnnnnnnnnnnnnnnnnnnnnnnnnnnnnnnnnnnnnnnnnnnnnnnnnnnnnnnnnnnnnnnnnnnnnnnnnnnnnnnnnnnnnnnnnnnnnnnnnnnnnnnnnnnnnnnnnnnnnnnnnnnnnnnnnnnnnnnnnnnnnnnnnnnnnnnnnnnnnnnnnnnnnnnnnnnnnnnnnnnnnnnnnnnnnnnnnnnnnnnnnnnnnnnnnnnnnnnnnnnnnnnnnnnnnnnnnnnnnnnnnnnnnnnnnnnnnnnnnnnnnnnnnnnnnnnnnnnnnnnnnnnnnnnnnnnnnnnnnnnnnnnnnnnnnnnnnnnnnnnnnnnnnnnnnnnnnnnnnnnnnnnnnnnnnnnnnnnnnnnnnnnnnnnnnnnnnnnnnnnnnnnnnnnnnnnnnnnnnnnnnnnnnnnnnnnnnnnnnnnnnnnnnnnnnnnnnnnnnnnnnnnnnnnnnnnnnnnnnnnnnnnnnnnnnnnnnnnnnnnnnnnnnnnnnnnnnnnnnnnnnnnnnnnnnnnnnnnnnnnnnnnnnnnnnnnnnnnnnnnnnnnnnnnnnnnnnnnnnnnnnnnnnnnnnnnnnnnnnnnnnnnnnnnnnnnnnnnnnnnnnnnnnnnnnnnnnnnnnnnnnnnnnnnnnnnnnnnnnnnnnnnnnnnnnnnnnnnnnnnnnnnnnnnnnnnnnnnnnnnnnnnnnnnnnnnnnnnnnnnnnnnnnnnnnnnnnnnnnnnnnnnnnnnnnnnnnnnnnnnnnnnnnnnnnnnnnnnnnnnnnnnnnnnnnnnnnnnnnnnnnnnnnnnnnnnnnnnnnnnnnnnnnnnnnnnnnnnnnnnnnnnnnnnnnnnnnnnnnnnnnnnnnnnnnnnnnnnnnnnnnnnnnnnnnnnnnnnnnnnnnnnnnnnnnnnnnnnnnnnnnnnnnnnnnnnnnnnnnnnnnnnnnnnnnnnnnnnnnnnnnnnnnnnnnnnnnnnnnnnnnnnnnnnnnnnnnnnnnnnnnnnnnnnnnnnnnnnnnnnnnnnnnnnnnnnnnnnnnnnnnnnnnnnnnnnnnnnnnnnnnnnnnnnnnnnnnnnnnnnnnnnnnnnnnnnnnnnnnnnnnnnnnnnnnnnnnnnnnnnnnnnnnnnnnnnnnnnnnnnnnnnnnnnnnnnnnnnnnnnnnnnnnnnnnnnnnnnnnnnnnnnnnnnnnnnnnnnnnnnnnnnnnnnnnnnnnnnnnnnnnnnnnnnnnnnnnnnnnnnnnnnnnnnnnnnnnnnnnnnnnnnnnnnnnnnnnnnnnnnnnnnnnnnnnnnnnnnnnnnnnnnnnnnnnnnnnnnnnnnnnnnnnnnnnnnnnnnnnnnnnnnnnnnnnnnnnnnnnnnnnnnnnnnnnnnnnnnnnnnnnnnnnnnnnnnnnnnnnnnnnnnnnnnnnnnnnnnnnnnnnnnnnnnnnnnnnnnnnnnnnnnnnnnnnnnnnnnnnnnnnnnnnnnnnnnnnnnnnnnnnnnnnnnnnnnnnnnnnnnnnnnnnnnnnnnnnnnnnnnnnnnnnnnnnnnnnnnnnnnnnnnnnnnnnnnnnnnnnnnnnnnnnnnnnnnnnnnnnnnnnnnnnnnnnnnnnnnnnnnnnnnnnnnnnnnnnnnnnnnnnnnnnnnnnnnnnnnnnnnnnnnnnnnnnnnnnnnnnnnnnnnnnnnnnnnnnnnnnnnnnnnnnnnnnnnnnnnnnnnnnnnnnnnnnnnnnnnnnnnnnnnnnnnnnnnnnnnnnnnnnnnnnnnnnnnnnnnnnnnnnnnnnnnnnnnnnnnnnnnnnnnnnnnnnnnnnnnnnnnnnnnnnnnnnnnnnnnnnnnnnnnnnnnnnnnnnnnnnnnnnnnnnnnnnnnnnnnnnnnnnnnnnnnnnnnnnnnnnnnnnnnnnnnnnnnnnnnnnnnnnnnnnnnnnnnnnnnnnnnnnnnnnnnnnnnnnnnnnnnnnnnnnnnnnnnnnnnnnnnnnnnnnnnnnnnnnnnnnnnnnnnnnnnnnnnnnnnnnnnnnnnnnnnnnnnnnnnnnnnnnnnnnnnnnnnnnnnnnnnnnnnnnnnnnnnnnnnnnnnnnnnnnnnnnnnnnnnnnnnnnnnnnnnnnnnnnnnnnnnnnnnnnnnnnnnnnnnnnnnnnnnnnnnnnnnnnnnnnnnnnnnnnnnnnnnnnnnnnnnnnnnnnnnnnnnnnnnnnnnnnnnnnnnnnnnnnnnnnnnnnnnnnnnnnnnnnnnnnnnnnnnnnnnnnnnnnnnnnnnnnnnnnnnnnnnnnnnnnnnnnnnnnnnnnnnnnnnnnnnnnnnnnnnnnnnnnnnnnnnnnnnnnnnnnnnnnnnnnnnnnnnnnnnnnnnnnnnnnnnnnnnnnnnnnnnnnnnnnnnnnnnnnnnnnnnnnnnnnnnnnnnnnnnnnnnnnnnnnnnnnnnnnnnnnnnnnnnnnnnnnnnnnnnnnnnnnnnnnnnnnnnnnnnnnnnnnnnnnnnnnnnnnnnnnnnnnnnnnnnnnnnnnnnnnnnnnnnnnnnnnnnnnnnnnnnnnnnnnnnnnnnnnnnnnnnnnnnnnnnnnnnnnnnnnnnnnnnnnnnnnnnnnnnnnnnnnnnnnnnnnnnnnnnnnnnnnnnnnnnnnnnnnnnnnnnnnnnnnnnnnnnnnnnnnnnnnnnnnnnnnnnnnnnnnnnnnnnnnnnnnnnnnnnnnnnnnnnnnnnnnnnnnnnnnnnnnnnnnnnnnnnnnnnnnnnnnnnnnnnnnnnnnnnnnnnnnnnnnnnnnnnnnnnnnnnnnnnnnnnnnnnnnnnnnnnnnnnnnnnnnnnnnnnnnnnnnnnnnnnnnnnnnnnnnnnnnnnnnnnnnnnnnnnnnnnnnnnnnnnnnnnnnnnnnnnnnnnnnnnnnnnnnnnnnnnnnnnnnnnnnnnnnnnnnnnnnnnnnnnnnnnnnnnnnnnnnnnnnnnnnnnnnnnnnnnnnnnnnnnnnnnnnnnnnnnnnnnnnnnnnnnnnnnnnnnnnnnnnnnnnnnnnnnnnnnnnnnnnnnnnnnnnnnnnnnnnnnnnnnnnnnnnnnnnnnnnnnnnnnnnnnnnnnnnnnnnnnnnnnnnnnnnnnnnnnnnnnnnnnnnnnnnnnnnnnnnnnnnnnnnnnnnnnnnnnnnnnnnnnnnnnnnnnnnnnnnnnnnnnnnnnnnnnnnnnnnnnnnnnnnnnnnnnnnnnnnnnnnnnnnnnnnnnnnnnnnnnnnnnnnnnnnnnnnnnnnnnnnnnnnnnnnnnnnnnnnnnnnnnnnnnnnnnnnnnnnnnnnnnnnnnnnnnnnnnnnnnnnnnnnnnnnnnnnnnnnnnnnnnnnnnnnnnnnnnnnnnnnnnnnnnnnnnnnnnnnnnnnnnnnnnnnnnnnnnnnnnnnnnnnnnnnnnnnnnnnnnnnnnnnnnnnnnnnnnnnnnnnnnnnnnnnnnnnnnnnnnnnnnnnnnnnnnnnnnnnnnnnnnnnnnnnnnnnnnnnnnnnnnnnnnnnnnnnnnnnnnnnnnnnnnnnnnnnnnnnnnnnnnnnnnnnnnnnnnnnnnnnnnnnnnnnnnnnnnnnnnnnnnnnnnnnnnnnnnnnnnnnnnnnnnnnnnnnnnnnnnnnnnnnnnnnnnnnnnnnnnnnnnnnnnnnnnnnnnnnnnnnnnnnnnnnnnnnnnnnnnnnnnnnnnnnnnnnnnnnnnnnnnnnnnnnnnnnnnnnnnnnnnnnnnnnnnnnnnnnnnnnnnnnnnnnnnnnnnnnnnnnnnnnnnnnnnnnnnnnnnnnnnnnnnnnnnnnnnnnnnnnnnnnnnnnnnnnnnnnnnnnnnnnnnnnnnnnnnnnnnnnnnnnnnnnnnnnnnnnnnnnnnnnnnnnnnnnnnnnnnnnnnnnnnnnnnnnnnnnnnnnnnnnnnnnnnnnnnnnnnnnnnnnnnnnnnnnnnnnnnnnnnnnnnnnnnnnnnnnnnnnnnnnnnnnnnnnnnnnnnnnnnnnnnnnnnnnnnnnnnnnnnnnnnnnnnnnnnnnnnnnnnnnnnnnnnnnnnnnnnnnnnnnnnnnnnnnnnnnnnnnnnnnnnnnnnnnnnnnnnnnnnnnnnnnnnnnnnnnnnnnnnnnnnnnnnnnnnnnnnnnnnnnnnnnnnnnnnnnnnnnnnnnnnnnnnnnnnnnnnnnnnnnnnnnnnnnnnnnnnnnnnnnnnnnnnnnnnnnnnnnnnnnnnnnnnnnnnnnnnnnnnnnnnnnnnnnnnnnnnnnnnnnnnnnnnnnnnnnnnnnnnnnnnnnnnnnnnnnnnnnnnnnnnnnnnnnnnnnnnnnnnnnnnnnnnnnnnnnnnnnnnnnnnnnnnnnnnnnnnnnnnnnnnnnnnnnnnnnnnnnnnnnnnnnnnnnnnnnnnnnnnnnnnnnnnnnnnnnnnnnnnnnnnnnnnnnnnnnnnnnnnnnnnnnnnnnnnnnnnnnnnnnnnnnnnnnnnnnnnnnnnnnnnnnnnnnnnnnnnnnnnnnnnnnnnnnnnnnnnnnnnnnnnnnnnnnnnnnnnnnnnnnnnnnnnnnnnnnnnnnnnnnnnnnnnnnnnnnnnnnnnnnnnnnnnnnnnnnnnnnnnnnnnnnnnnnnnnnnnnnnnnnnnnnnnnnnnnnnnnnnnnnnnnnnnnnnnnnnnnnnnnnnnnnnnnnnnnnnnnnnnnnnnnnnnnnnnnnnnnnnnnnnnnnnnnnnnnnnnnnnnnnnnnnnnnnnnnnnnnnnnnnnnnnnnnnnnnnnnnnnnnnnnnnnnnnnnnnnnnnnnnnnnnnnnnnnnnnnnnnnnnnnnnnnnnnnnnnnnnnnnnnnnnnnnnnnnnnnnnnnnnnnnnnnnnnnnnnnnnnnnnnnnnnnnnnnnnnnnnnnnnnnnnnnnnnnnnnnnnnnnnnnnnnnnnnnnnnnnnnnnnnnnnnnnnnnnnnnnnnnnnnnnnnnnnnnnnnnnnnnnnnnnnnnnnnnnnnnnnnnnnnnnnnnnnnnnnnnnnnnnnnnnnnnnnnnnnnnnnnnnnnnnnnnnnnnnnnnnnnnnnnnnnnnnnnnnnnnnnnnnnnnnnnnnnnnnnnnnnnnnnnnnnnnnnnnnnnnnnnnnnnnnnnnnnnnnnnnnnnnnnnnnnnnnnnnnnnnnnnnnnnnnnnnnnnnnnnnnnnnnnnnnnnnnnnnnnnnnnnnnnnnnnnnnnnnnnnnnnnnnnnnnnnnnnnnnnnnnnnnnnnnnnnnnnnnnnnnnnnnnnnnnnnnnnnnnnnnnnnnnnnnnnnnnnnnnnnnnnnnnnnnnnnnnnnnnnnnnnnnnnnnnnnnnnnnnnnnnnnnnnnnnnnnnnnnnnnnnnnnnnnnnnnnnnnnnnnnnnnnnnnnnnnnnnnnnnnnnnnnnnnnnnnnnnnnnnnnnnnnnnnnnnnnnnnnnnnnnnnnnnnnnnnnnnnnnnnnnnnnnnnnnnnnnnnnnnnnnnnnnnnnnnnnnnnnnnnnnnnnnnnnnnnnnnnnnnnnnnnnnnnnnnnnnnnnnnnnnnnnnnnnnnnnnnnnnnnnnnnnnnnnnnnnnnnnnnnnnnnnnnnnnnnnnnnnnnnnnnnnnnnnnnnnnnnnnnnnnnnnnnnnnnnnnnnnnnnnnnnnnnnnnnnnnnnnnnnnnnnnnnnnnnnnnnnnnnnnnnnnnnnnnnnnnnnnnnnnnnnnnnnnnnnnnnnnnnnnnnnnnnnnnnnnnnnnnnnnnnnnnnnnnnnnnnnnnnnnnnnnnnnnnnnnnnnnnnnnnnnnnnnnnnnnnnnnnnnnnnnnnnnnnnnnnnnnnnnnnnnnnnnnnnnnnnnnnnnnnnnnnnnnnnnnnnnnnnnnnnnnnnnnnnnnnnnnnnnnnnnnnnnnnnnnnnnnnnnnnnnnnnnnnnnnnnnnnnnnnnnnnnnnnnnnnnnnnnnnnnnnnnnnnnnnnnnnnnnnnnnnnnnnnnnnnnnnnnnnnnnnnnnnnnnnnnnnnnnnnnnnnnnnnnnnnnnnnnnnnnnnnnnnnnnnnnnnnnnnnnnnnnnnnnnnnnnnnnnnnnnnnnnnnnnnnnnnnnnnnnnnnnnnnnnnnnnnnnnnnnnnnnnnnnnnnnnnnnnnnnnnnnnnnnnnnnnnnnnnnnnnnnnnnnnnnnnnnnnnnnnnnnnnnnnnnnnnnnnnnnnnnnnnnnnnnnnnnnnnnnnnnnnnnnnnnnnnnnnnnnnnnnnnnnnnnnnnnnnnnnnnnnnnnnnnnnnnnnnnnnnnnnnnnnnnnnnnnnnnnnnnnnnnnnnnnnnnnnnnnnnnnnnnnnnnnnnnnnnnnnnnnnnnnnnnnnnnnnnnnnnnnnnnnnnnnnnnnnnnnnnnnnnnnnnnnnnnnnnnnnnnnnnnnnnnnnnnnnnnnnnnnnnnnnnnnnnnnnnnnnnnnnnnnnnnnnnnnnnnnnnnnnnnnnnnnnnnnnnnnnnnnnnnnnnnnnnnnnnnnnnnnnnnnnnnnnnnnnnnnnnnnnnnnnnnnnnnnnnnnnnnnnnnnnnnnnnnnnnnnnnnnnnnnnnnnnnnnnnnnnnnnnnnnnnnnnnnnnnnnnnnnnnnnnnnnnnnnnnnnnnnnnnnnnnnnnnnnnnnnnnnnnnnnnnnnnnnnnnnnnnnnnnnnnnnnnnnnnnnnnnnnnnnnnnnnnnnnnnnnnnnnnnnnnnnnnnnnnnnnnnnnnnnnnnnnnnnnnnnnnnnnnnnnnnnnnnnnnnnnnnnnnnnnnnnnnnnnnnnnnnnnnnnnnnnnnnnnnnnnnnnnnnnnnnnnnnnnnnnnnnnnnnnnnnnnnnnnnnnnnnnnnnnnnnnnnnnnnnnnnnnnnnnnnnnnnnnnnnnnnnnnnnnnnnnnnnnnnnnnnnnnnnnnnnnnnnnnnnnnnnnnnnnnnnnnnnnnnnnnnnnnnnnnnnnnnnnnnnnnnnnnnnnnnnnnnnnnnnnnnnnnnnnnnnnnnnnnnnnnnnnnnnnnnnnnnnnnnnnnnnnnnnnnnnnnnnnnnnnnnnnnnnnnnnnnnnnnnnnnnnnnnnnnnnnnnnnnnnnnnnnnnnnnnnnnnnnnnnnnnnnnnnnnnnnnnnnnnnnnnnnnnnnnnnnnnnnnnnnnnnnnnnnnnnnnnnnnnnnnnnnnnnnnnnnnnnnnnnnnnnnnnnnnnnnnnnnnnnnnnnnnnnnnnnnnnnnnnnnnnnnnnnnnnnnnnnnnnnnnnnnnnnnnnnnnnnnnnnnnnnnnnnnnnnnnnnnnnnnnnnnnnnnnnnnnnnnnnnnnnnnnnnnnnnnnnnnnnnnnnnnnnnnnnnnnnnnnnnnnnnnnnnnnnnnnnnnnnnnnnnnnnnnnnnnnnnnnnnnnnnnnnnnnnnnnnnnnnnnnnnnnnnnnnnnnnnnnnnnnnnnnnnnnnnnnnnnnnnnnnnnnnnnnnnnnnnnnnnnnnnnnnnnnnnnnnnnnnnnnnnnnnnnnnnnnnnnnnnnnnnnnnnnnnnnnnnnnnnnnnnnnnnnnnnnnnnnnnnnnnnnnnnnnnnnnnnnnnnnnnnnnnnnnnnnnnnnnnnnnnnnnnnnnnnnnnnnnnnnnnnnnnnnnnnnnnnnnnnnnnnnnnnnnnnnnnnnnnnnnnnnnnnnnnnnnnnnnnnnnnnnnnnnnnnnnnnnnnnnnnnnnnnnnnnnnnnnnnnnnnnnnnnnnnnnnnnnnnnnnnnnnnnnnnnnnnnnnnnnnnnnnnnnnnnnnnnnnnnnnnnnnnnnnnnnnnnnnnnnnnnnnnnnnnnnnnnnnnnnnnnnnnnnnnnnnnnnnnnnnnnnnnnnnnnnnnnnnnnnnnnnnnnnnnnnnnnnnnnnnnnnnnnnnnnnnnnnnnnnnnnnnnnnnnnnnnnnnnnnnnnnnnnnnnnnnnnnnnnnnnnnnnnnnnnnnnnnnnnnnnnnnnnnnnnnnnnnnnnnnnnnnnnnnnnnnnnnnnnnnnnnnnnnnnnnnnnnnnnnnnnnnnnnnnnnnnnnnnnnnnnnnnnnnnnnnnnnnnnnnnnnnnnnnnnnnnnnnnnnnnnnnnnnnnnnnnnnnnnnnnnnnnnnnnnnnnnnnnnnnnnnnnnnnnnnnnnnnnnnnnnnnnnnnnnnnnnnnnnnnnnnnnnnnnnnnnnnnnnnnnnnnnnnnnnnnnnnnnnnnnnnnnnnnnnnnnnnnnnnnnnnnnnnnnnnnnnnnnnnnnnnnnnnnnnnnnnnnnnnnnnnnnnnnnnnnnnnnnnnnnnnnnnnnnnnnnnnnnnnnnnnnnnnnnnnnnnnnnnnnnnnnnnnnnnnnnnnnnnnnnnnnnnnnnnnnnnnnnnnnnnnnnnnnnnnnnnnnnnnnnnnnnnnnnnnnnnnnnnnnnnnnnnnnnnnnnnnnnnnnnnnnnnnnnnnnnnnnnnnnnnnnnnnnnnnnnnnnnnnnnnnnnnnnnnnnnnnnnnnnnnnnnnnnnnnnnnnnnnnnnnnnnnnnnnnnnnnnnnnnnnnnnnnnnnnnnnnnnnnnnnnnnnnnnnnnnnnnnnnnnnnnnnnnnnnnnnnnnnnnnnnnnnnnnnnnnnnnnnnnnnnnnnnnnnnnnnnnnnnnnnnnnnnnnnnnnnnnnnnnnnnnnnnnnnnnnnnnnnnnnnnnnnnnnnnnnnnnnnnnnnnnnnnnnnnnnnnnnnnnnnnnnnnnnnnnnnnnnnnnnnnnnnnnnnnnnnnnnnnnnnnnnnnnnnnnnnnnnnnnnnnnnnnnnnnnnnnnnnnnnnnnnnnnnnnnnnnnnnnnnnnnnnnnnnnnnnnnnnnnnnnnnnnnnnnnnnnnnnnnnnnnnnnnnnnnnnnnnnnnnnnnnnnnnnnnnnnnnnnnnnnnnnnnnnnnnnnnnnnnnnnnnnnnnnnnnnnnnnnnnnnnnnnnnnnnnnnnnnnnnnnnnnnnnnnnnnnnnnnnnnnnnnnnnnnnnnnnnnnnnnnnnnnnnnnnnnnnnnnnnnnnnnnnnnnnnnnnnnnnnnnnnnnnnnnnnnnnnnnnnnnnnnnnnnnnnnnnnnnnnnnnnnnnnnnnnnnnnnnnnnnnnnnnnnnnnnnnnnnnnnnnnnnnnnnnnnnnnnnnnnnnnnnnnnnnnnnnnnnnnnnnnnnnnnnnnnnnnnnnnnnnnnnnnnnnnnnnnnnnnnnnnnnnnnnnnnnnnnnnnnnnnnnnnnnnnnnnnnnnnnnnnnnnnnnnnnnnnnnnnnnnnnnnnnnnnnnnnnnnnnnnnnnnnnnnnnnnnnnnnnnnnnnnnnnnnnnnnnnnnnnnnnnnnnnnnnnnnnnnnnnnnnnnnnnnnnnnnnnnnnnnnnnnnnnnnnnnnnnnnnnnnnnnnnnnnnnnnnnnnnnnnnnnnnnnnnnnnnnnnnnnnnnnnnnnnnnnnnnnnnnnnnnnnnnnnnnnnnnnnnnnnnnnnnnnnnnnnnnnnnnnnnnnnnnnnnnnnnnnnnnnnnnnnnnnnnnnnnnnnnnnnnnnnnnnnnnnnnnnnnnnnnnnnnnnnnnnnnnnnnnnnnnnnnnnnnnnnnnnnnnnnnnnnnnnnnnnnnnnnnnnnnnnnnnnnnnnnnnnnnnnnnnnnnnnnnnnnnnnnnnnnnnnnnnnnnnnnnnnnnnnnnnnnnnnnnnnnnnnnnnnnnnnnnnnnnnnnnnnnnnnnnnnnnnnnnnnnnnnnnnnnnnnnnnnnnnnnnnnnnnnnnnnnnnnnnnnnnnnnnnnnnnnnnnnnnnnnnnnnnnnnnnnnnnnnnnnnnnnnnnnnnnnnnnnnnnnnnnnnnnnnnnnnnnnnnnnnnnnnnnnnnnnnnnnnnnnnnnnnnnnnnnnnnnnnnnnnnnnnnnnnnnnnnnnnnnnnnnnnnnnnnnnnnnnnnnnnnnnnnnnnnnnnnnnnnnnnnnnnnnnnnnnnnnnnnnnnnnnnnnnnnnnnnnnnnnnnnnnnnnnnnnnnnnnnnnnnnnnnnnnnnnnnnnnnnnnnnnnnnnnnnnnnnnnnnnnnnnnnnnnnnnnnnnnnnnnnnnnnnnnnnnnnnnnnnnnnnnnnnnnnnnnnnnnnnnnnnnnnnnnnnnnnnnnnnnnnnnnnnnnnnnnnnnnnnnnnnnnnnnnnnnnnnnnnnnnnnnnnnnnnnnnnnnnnnnnnnnnnnnnnnnnnnnnnnnnnnnnnnnnnnnnnnnnnnnnnnnnnnnnnnnnnnnnnnnnnnnnnnnnnnnnnnnnnnnnnnnnnnnnnnnnnnnnnnnnnnnnnnnnnnnnnnnnnnnnnnnnnnnnnnnnnnnnnnnnnnnnnnnnnnnnnnnnnnnnnnnnnnnnnnnnnnnnnnnnnnnnnnnnnnnnnnnnnnnnnnnnnnnnnnnnnnnnnnnnnnnnnnnnnnnnnnnnnnnnnnnnnnnnnnnnnnnnnnnnnnnnnnnnnnnnnnnnnnnnnnnnnnnnnnnnnnnnnnnnnnnnnnnnnnnnnnnnnnnnnnnnnnnnnnnnnnnnnnnnnnnnnnnnnnnnnnnnnnnnnnnnnnnnnnnnnnnnnnnnnnnnnnnnnnnnnnnnnnnnnnnnnnnnnnnnnnnnnnnnnnnnnnnnnnnnnnnnnnnnnnnnnnnnnnnnnnnnnnnnnnnnnnnnnnnnnnnnnnnnnnnnnnnnnnnnnnnnnnnnnnnnnnnnnnnnnnnnnnnnnnnnnnnnnnnnnnnnnnnnnnnnnnnnnnnnnnnnnnnnnnnnnnnnnnnnnnnnnnnnnnnnnnnnnnnnnnnnnnnnnnnnnnnnnnnnnnnnnnnnnnnnnnnnnnnnnnnnnnnnnnnnnnnnnnnnnnnnnnnnnnnnnnnnnnnnnnnnnnnnnnnnnnnnnnnnnnnnnnnnnnnnnnnnnnnnnnnnnnnnnnnnnnnnnnnnnnnnnnnnnnnnnnnnnnnnnnnnnnnnnnnnnnnnnnnnnnnnnnnnnnnnnnnnnnnnnnnnnnnnnnnnnnnnnnnnnnnnnnnnnnnnnnnnnnnnnnnnnnnnnnnnnnnnnnnnnnnnnnnnnnnnnnnnnnnnnnnnnnnnnnnnnnnnnnnnnnnnnnnnnnnnnnnnnnnnnnnnnnnnnnnnnnnnnnnnnnnnnnnnnnnnnnnnnnnnnnnnnnnnnnnnnnnnnnnnnnnnnnnnnnnnnnnnnnnnnnnnnnnnnnnnnnnnnnnnnnnnnnnnnnnnnnnnnnnnnnnnnnnnnnnnnnnnnnnnnnnnnnnnnnnnnnnnnnnnnnnnnnnnnnnnnnnnnnnnnnnnnnnnnnnnnnnnnnnnnnnnnnnnnnnnnnnnnnnnnnnnnnnnnnnnnnnnnnnnnnnnnnnnnnnnnnnnnnnnnnnnnnnnnnnnnnnnnnnnnnnnnnnnnnnnnnnnnnnnnnnnnnnnnnnnnnnnnnnnnnnnnnnnnnnnnnnnnnnnnnnnnnnnnnnnnnnnnnnnnnnnnnnnnnnnnnnnnnnnnnnnnnnnnnnnnnnnnnnnnnnnnnnnnnnnnnnnnnnnnnnnnnnnnnnnnnnnnnnnnnnnnnnnnnnnnnnnnnnnnnnnnnnnnnnnnnnnnnnnnnnnnnnnnnnnnnnnnnnnnnnnnnnnnnnnnnnnnnnnnnnnnnnnnnnnnnnnnnnnnnnnnnnnnnnnnnnnnnnnnnnnnnnnnnnnnnnnnnnnnnnnnnnnnnnnnnnnnnnnnnnnnnnnnnnnnnnnnnnnnnnnnnnnnnnnnnnnnnnnnnnnnnnnnnnnnnnnnnnnnnnnnnnnnnnnnnnnnnnnnnnnnnnnnnnnnnnnnnnnnnnnnnnnnnnnnnnnnnnnnnnnnnnnnnnnnnnnnnnnnnnnnnnnnnnnnnnnnnnnnnnnnnnnnnnnnnnnnnnnnnnnnnnnnnnnnnnnnnnnnnnnnnnnnnnnnnnnnnnnnnnnnnnnnnnnnnnnnnnnnnnnnnnnnnnnnnnnnnnnnnnnnnnnnnnnnnnnnnnnnnnnnnnnnnnnnnnnnnnnnnnnnnnnnnnnnnnnnnnnnnnnnnnnnnnnnnnnnnnnnnnnnnnnnnnnnnnnnnnnnnnnnnnnnnnnnnnnnnnnnnnnnnnnnnnnnnnnnnnnnnnnnnnnnnnnnnnnnnnnnnnnnnnnnnnnnnnnnnnnnnnnnnnnnnnnnnnnnnnnnnnnnnnnnnnnnnnnnnnnnnnnnnnnnnnnnnnnnnnnnnnnnnnnnnnnnnnnnnnnnnnnnnnnnnnnnnnnnnnnnnnnnnnnnnnnnnnnnnnnnnnnnnnnnnnnnnnnnnnnnnnnnnnnnnnnnnnnnnnnnnnnnnnnnnnnnnnnnnnnnnnnnnnnnnnnnnnnnnnnnnnnnnnnnnnnnnnnnnnnnnnnnnnnnnnnnnnnnnnnnnnnnnnnnnnnnnnnnnnnnnnnnnnnnnnnnnnnnnnnnnnnnnnnnnnnnnnnnnnnnnnnnnnnnnnnnnnnnnnnnnnnnnnnnnnnnnnnnnnnnnnnnnnnnnnnnnnnnnnnnnnnnnnnnnnnnnnnnnnnnnnnnnnnnnnnnnnnnnnnnnnnnnnnnnnnnnnnnnnnnnnnnnnnnnnnnnnnnnnnnnnnnnnnnnnnnnnnnnnnnnnnnnnnnnnnnnnnnnnnnnnnnnnnnnnnnnnnnnnnnnnnnnnnnnnnnnnnnnnnnnnnnnnnnnnnnnnnnnnnnnnnnnnnnnnnnnnnnnnnnnnnnnnnnnnnnnnnnnnnnnnnnnnnnnnnnnnnnnnnnnnnnnnnnnnnnnnnnnnnnnnnnnnnnnnnnnnnnnnnnnnnnnnnnnnnnnnnnnnnnnnnnnnnnnnnnnnnnnnnnnnnnnnnnnnnnnnnnnnnnnnnnnnnnnnnnnnnnnnnnnnnnnnnnnnnnnnnnnnnnnnnnnnnnnnnnnnnnnnnnnnnnnnnnnnnnnnnnnnnnnnnnnnnnnnnnnnnnnnnnnnnnnnnnnnnnnnnnnnnnnnnnnnnnnnnnnnnnnnnnnnnnnnnnnnnnnnnnnnnnnnnnnnnnnnnnnnnnnnnnnnnnnnnnnnnnnnnnnnnnnnnnnnnnnnnnnnnnnnnnnnnnnnnnnnnnnnnnnnnnnnnnnnnnnnnnnnnnnnnnnnnnnnnnnnnnnnnnnnnnnnnnnnnnnnnnnnnnnnnnnnnnnnnnnnnnnnnnnnnnnnnnnnnnnnnnnnnnnnnnnnnnnnnnnnnnnnnnnnnnnnnnnnnnnnnnnnnnnnnnnnnnnnnnnnnnnnnnnnnnnnnnnnnnnnnnnnnnnnnnnnnnnnnnnnnnnnnnnnnnnnnnnnnnnnnnnnnnnnnnnnnnnnnnnnnnnnnnnnnnnnnnnnnnnnnnnnnnnnnnnnnnnnnnnnnnnnnnnnnnnnnnnnnnnnnnnnnnnnnnnnnnnnnnnnnnnnnnnnnnnnnnnnnnnnnnnnnnnnnnnnnnnnnnnnnnnnnnnnnnnnnnnnnnnnnnnnnnnnnnnnnnnnnnnnnnnnnnnnnnnnnnnnnnnnnnnnnnnnnnnnnnnnnnnnnnnnnnnnnnnnnnnnnnnnnnnnnnnnnnnnnnnnnnnnnnnnnnnnnnnnnnnnnnnnnnnnnnnnnnnnnnnnnnnnnnnnnnnnnnnnnnnnnnnnnnnnnnnnnnnnnnnnnnnnnnnnnnnnnnnnnnnnnnnnnnnnnnnnnnnnnnnnnnnnnnnnnnnnnnnnnnnnnnnnnnnnnnnnnnnnnnnnnnnnnnnnnnnnnnnnnnnnnnnnnnnnnnnnnnnnnnnnnnnnnnnnnnnnnnnnnnnnnnnnnnnnnnnnnnnnnnnnnnnnnnnnnnnnnnnnnnnnnnnnnnnnnnnnnnnnnnnnnnnnnnnnnnnnnnnnnnnnnnnnnnnnnnnnnnnnnnnnnnnnnnnnnnnnnnnnnnnnnnnnnnnnnnnnnnnnnnnnnnnnnnnnnnnnnnnnnnnnnnnnnnnnnnnnnnnnnnnnnnnnnnnnnnnnnnnnnnnnnnnnnnnnnnnnnnnnnnnnnnnnnnnnnnnnnnnnnnnnnnnnnnnnnnnnnnnnnnnnnnnnnnnnnnnnnnnnnnnnnnnnnnnnnnnnnnnnnnnnnnnnnnnnnnnnnnnnnnnnnnnnnnnnnnnnnnnnnnnnnnnnnnnnnnnnnnnnnnnnnnnnnnnnnnnnnnnnnnnnnnnnnnnnnnnnnnnnnnnnnnnnnnnnnnnnnnnnnnnnnnnnnnnnnnnnnnnnnnnnnnnnnnnnnnnnnnnnnnnnnnnnnnnnnnnnnnnnnnnnnnnnnnnnnnnnnnnnnnnnnnnnnnnnnnnnnnnnnnnnnnnnnnnnnnnnnnnnnnnnnnnnnnnnnnnnnnnnnnnnnnnnnnnnnnnnnnnnnnnnnnnnnnnnnnnnnnnnnnnnnnnnnnnnnnnnnnnnnnnnnnnnnnnnnnnnnnnnnnnnnnnnnnnnnnnnnnnnnnnnnnnnnnnnnnnnnnnnnnnnnnnnnnnnnnnnnnnnnnnnnnnnnnnnnnnnnnnnnnnnnnnnnnnnnnnnnnnnnnnnnnnnnnnnnnnnnnnnnnnnnnnnnnnnnnnnnnnnnnnnnnnnnnnnnnnnnnnnnnnnnnnnnnnnnnnnnnnnnnnnnnnnnnnnnnnnnnnnnnnnnnnnnnnnnnnnnnnnnnnnnnnnnnnnnnnnnnnnnnnnnnnnnnnnnnnnnnnnnnnnnnnnnnnnnnnnnnnnnnnnnnnnnnnnnnnnnnnnnnnnnnnnnnnnnnnnnnnnnnnnnnnnnnnnnnnnnnnnnnnnnnnnnnnnnnnnnnnnnnnnnnnnnnnnnnnnnnnnnnnnnnnnnnnnnnnnnnnnnnnnnnnnnnnnnnnnnnnnnnnnnnnnnnnnnnnnnnnnnnnnnnnnnnnnnnnnnnnnnnnnnnnnnnnnnnnnnnnnnnnnnnnnnnnnnnnnnnnnnnnnnnnnnnnnnnnnnnnnnnnnnnnnnnnnnnnnnnnnnnnnnnnnnnnnnnnnnnnnnnnnnnnnnnnnnnnnnnnnnnnnnnnnnnnnnnnnnnnnnnnnnnnnnnnnnnnnnnnnnnnnnnnnnnnnnnnnnnnnnnnnnnnnnnnnnnnnnnnnnnnnnnnnnnnnnnnnnnnnnnnnnnnnnnnnnnnnnnnnnnnnnnnnnnnnnnnnnnnnnnnnnnnnnnnnnnnnnnnnnnnnnnnnnnnnnnnnnnnnnnnnnnnnnnnnnnnnnnnnnnnnnnnnnnnnnnnnnnnnnnnnnnnnnnnnnnnnnnnnnnnnnnnnnnnnnnnnnnnnnnnnnnnnnnnnnnnnnnnnnnnnnnnnnnnnnnnnnnnnnnnnnnnnnnnnnnnnnnnnnnnnnnnnnnnnnnnnnnnnnnnnnnnnnnnnnnnnnnnnnnnnnnnnnnnnnnnnnnnnnnnnnnnnnnnnnnnnnnnnnnnnnnnnnnnnnnnnnnnnnnnnnnnnnnnnnnnnnnnnnnnnnnnnnnnnnnnnnnnnnnnnnnnnnnnnnnnnnnnnnnnnnnnnnnnnnnnnnnnnnnnnnnnnnnnnnnnnnnnnnnnnnnnnnnnnnnnnnnnnnnnnnnnnnnnnnnnnnnnnnnnnnnnnnnnnnnnnnnnnnnnnnnnnnnnnnnnnnnnnnnnnnnnnnnnnnnnnnnnnnnnnnnnnnnnnnnnnnnnnnnnnnnnnnnnnnnnnnnnnnnnnnnnnnnnnnnnnnnnnnnnnnnnnnnnnnnnnnnnnnnnnnnnnnnnnnnnnnnnnnnnnnnnnnnnnnnnnnnnnnnnnnnnnnnnnnnnnnnnnnnnnnnnnnnnnnnnnnnnnnnnnnnnnnnnnnnnnnnnnnnnnnnnnnnnnnnnnnnnnnnnnnnnnnnnnnnnnnnnnnnnnnnnnnnnnnnnnnnnnnnnnnnnnnnnnnnnnnnnnnnnnnnnnnnnnnnnnnnnnnnnnnnnnnnnnnnnnnnnnnnnnnnnnnnnnnnnnnnnnnnnnnnnnnnnnnnnnnnnnnnnnnnnnnnnnnnnnnnnnnnnnnnnnnnnnnnnnnnnnnnnnnnnnnnnnnnnnnnnnnnnnnnnnnnnnnnnnnnnnnnnnnnnnnnnnnnnnnnnnnnnnnnnnnnnnnnnnnnnnnnnnnnnnnnnnnnnnnnnnnnnnnnnnnnnnnnnnnnnnnnnnnnnnnnnnnnnnnnnnnnnnnnnnnnnnnnnnnnnnnnnnnnnnnnnnnnnnnnnnnnnnnnnnnnnnnnnnnnnnnnnnnnnnnnnnnnnnnnnnnnnnnnnnnnnnnnnnnnnnnnnnnnnnnnnnnnnnnnnnnnnnnnnnnnnnnnnnnnnnnnnnnnnnnnnnnnnnnnnnnnnnnnnnnnnnnnnnnnnnnnnnnnnnnnnnnnnnnnnnnnnnnnnnnnnnnnnnnnnnnnnnnnnnnnnnnnnnnnnnnnnnnnnnnnnnnnnnnnnnnnnnnnnnnnnnnnnnnnnnnnnnnnnnnnnnnnnnnnnnnnnnnnnnnnnnnnnnnnnnnnnnnnnnnnnnnnnnnnnnnnnnnnnnnnnnnnnnnnnnnnnnnnnnnnnnnnnnnnnnnnnnnnnnnnnnnnnnnnnnnnnnnnnnnnnnnnnnnnnnnnnnnnnnnnnnnnnnnnnnnnnnnnnnnnnnnnnnnnnnnnnnnnnnnnnnnnnnnnnnnnnnnnnnnnnnnnnnnnnnnnnnnnnnnnnnnnnnnnnnnnnnnnnnnnnnnnnnnnnnnnnnnnnnnnnnnnnnnnnnnnnnnnnnnnnnnnnnnnnnnnnnnnnnnnnnnnnnnnnnnnnnnnnnnnnnnnnnnnnnnnnnnnnnnnnnnnnnnnnnnnnnnnnnnnnnnnnnnnnnnnnnnnnnnnnnnnnnnnnnnnnnnnnnnnnnnnnnnnnnnnnnnnnnnnnnnnnnnnnnnnnnnnnnnnnnnnnnnnnnnnnnnnnnnnnnnnnnnnnnnnnnnnnnnnnnnnnnnnnnnnnnnnnnnnnnnnnnnnnnnnnnnnnnnnnnnnnnnnnnnnnnnnnnnnnnnnnnnnnnnnnnnnnnnnnnnnnnnnnnnnnnnnnnnnnnnnnnnnnnnnnnnnnnnnnnnnnnnnnnnnnnnnnnnnnnnnnnnnnnnnnnnnnnnnnnnnnnnnnnnnnnnnnnnnnnnnnnnnnnnnnnnnnnnnnnnnnnnnnnnnnnnnnnnnnnnnnnnnnnnnnnnnnnnnnnnnnnnnnnnnnnnnnnnnnnnnnnnnnnnnnnnnnnnnnnnnnnnnnnnnnnnnnnnnnnnnnnnnnnnnnnnnnnnnnnnnnnnnnnnnnnnnnnnnnnnnnnnnnnnnnnnnnnnnnnnnnnnnnnnnnnnnnnnnnnnnnnnnnnnnnnnnnnnnnnnnnnnnnnnnnnnnnnnnnnnnnnnnnnnnnnnnnnnnnnnnnnnnnnnnnnnnnnnnnnnnnnnnnnnnnnnnnnnnnnnnnnnnnnnnnnnnnnnnnnnnnnnnnnnnnnnnnnnnnnnnnnnnnnnnnnnnnnnnnnnnnnnnnnnnnnnnnnnnnnnnnnnnnnnnnnnnnnnnnnnnnnnnnnnnnnnnnnnnnnnnnnnnnnnnnnnnnnnnnnnnnnnnnnnnnnnnnnnnnnnnnnnnnnnnnnnnnnnnnnnnnnnnnnnnnnnnnnnnnnnnnnnnnnnnnnnnnnnnnnnnnnnnnnnnnnnnnnnnnnnnnnnnnnnnnnnnnnnnnnnnnnnnnnnnnnnnnnnnnnnnnnnnnnnnnnnnnnnnnnnnnnnnnnnnnnnnnnnnnnnnnnnnnnnnnnnnnnnnnnnnnnnnnnnnnnnnnnnnnnnnnnnnnnnnnnnnnnnnnnnnnnnnnnnnnnnnnnnnnnnnnnnnnnnnnnnnnnnnnnnnnnnnnnnnnnnnnnnnnnnnnnnnnnnnnnnnnnnnnnnnnnnnnnnnnnnnnnnnnnnnnnnnnnnnnnnnnnnnnnnnnnnnnnnnnnnnnnnnnnnnnnnnnnnnnnnnnnnnnnnnnnnnnnnnnnnnnnnnnnnnnnnnnnnnnnnnnnnnnnnnnnnnnnnnnnnnnnnnnnnnnnnnnnnnnnnnnnnnnnnnnnnnnnnnnnnnnnnnnnnnnnnnnnnnnnnnnnnnnnnnnnnnnnnnnnnnnnnnnnnnnnnnnnnnnnnnnnnnnnnnnnnnnnnnnnnnnnnnnnnnnnnnnnnnnnnnnnnnnnnnnnnnnnnnnnnnnnnnnnnnnnnnnnnnnnnnnnnnnnnnnnnnnnnnnnnnnnnnnnnnnnnnnnnnnnnnnnnnnnnnnnnnnnnnnnnnnnnnnnnnnnnnnnnnnnnnnnnnnnnnnnnnnnnnnnnnnnnnnnnnnnnnnnnnnnnnnnnnnnnnnnnnnnnnnnnnnnnnnnnnnnnnnnnnnnnnnnnnnnnnnnnnnnnnnnnnnnnnnnnnnnnnnnnnnnnnnnnnnnnnnnnnnnnnnnnnnnnnnnnnnnnnnnnnnnnnnnnnnnnnnnnnnnnnnnnnnnnnnnnnnnnnnnnnnnnnnnnnnnnnnnnnnnnnnnnnnnnnnnnnnnnnnnnnnnnnnnnnnnnnnnnnnnnnnnnnnnnnnnnnnnnnnnnnnnnnnnnnnnnnnnnnnnnnnnnnnnnnnnnnnnnnnnnnnnnnnnnnnnnnnnnnnnnnnnnnnnnnnnnnnnnnnnnnnnnnnnnnnnnnnnnnnnnnnnnnnnnnnnnnnnnnnnnnnnnnnnnnnnnnnnnnnnnnnnnnnnnnnnnnnnnnnnnnnnnnnnnnnnnnnnnnnnnnnnnnnnnnnnnnnnnnnnnnnnnnnnnnnnnnnnnnnnnnnnnnnnnnnnnnnnnnnnnnnnnnnnnnnnnnnnnnnnnnnnnnnnnnnnnnnnnnnnnnnnnnnnnnnnnnnnnnnnnnnnnnnnnnnnnnnnnnnnnnnnnnnnnnnnnnnnnnnnnnnnnnnnnnnnnnnnnnnnnnnnnnnnnnnnnnnnnnnnnnnnnnnnnnnnnnnnnnnnnnnnnnnnnnnnnnnnnnnnnnnnnnnnnnnnnnnnnnnnnnnnnnnnnnnnnnnnnnnnnnnnnnnnnnnnnnnnnnnnnnnnnnnnnnnnnnnnnnnnnnnnnnnnnnnnnnnnnnnnnnnnnnnnnnnnnnnnnnnnnnnnnnnnnnnnnnnnnnnnnnnnnnnnnnnnnnnnnnnnnnnnnnnnnnnnnnnnnnnnnnnnnnnnnnnnnnnnnnnnnnnnnnnnnnnnnnnnnnnnnnnnnnnnnnnnnnnnnnnnnnnnnnnnnnnnnnnnnnnnnnnnnnnnnnnnnnnnnnnnnnnnnnnnnnnnnnnnnnnnnnnnnnnnnnnnnnnnnnnnnnnnnnnnnnnnnnnnnnnnnnnnnnnnnnnnnnnnnnnnnnnnnnnnnnnnnnnnnnnnnnnnnnnnnnnnnnnnnnnnnnnnnnnnnnnnnnnnnnnnnnnnnnnnnnnnnnnnnnnnnnnnnnnnnnnnnnnnnnnnnnnnnnnnnnnnnnnnnnnnnnnnnnnnnnnnnnnnnnnnnnnnnnnnnnnnnnnnnnnnnnnnnnnnnnnnnnnnnnnnnnnnnnnnnnnnnnnnnnnnnnnnnnnnnnnnnnnnnnnnnnnnnnnnnnnnnnnnnnnnnnnnnnnnnnnnnnnnnnnnnnnnnnnnnnnnnnnnnnnnnnnnnnnnnnnnnnnnnnnnnnnnnnnnnnnnnnnnnnnnnnnnnnnnnnnnnnnnnnnnnnnnnnnnnnnnnnnnnnnnnnnnnnnnnnnnnnnnnnnnnnnnnnnnnnnnnnnnnnnnnnnnnnnnnnnnnnnnnnnnnnnnnnnnnnnnnnnnnnnnnnnnnnnnnnnnnnnnnnnnnnnnnnnnnnnnnnnnnnnnnnnnnnnnnnnnnnnnnnnnnnnnnnnnnnnnnnnnnnnnnnnnnnnnnnnnnnnnnnnnnnnnnnnnnnnnnnnnnnnnnnnnnnnnnnnnnnnnnnnnnnnnnnnnnnnnnnnnnnnnnnnnnnnnnnnnnnnnnnnnnnnnnnnnnnnnnnnnnnnnnnnnnnnnnnnnnnnnnnnnnnnnnnnnnnnnnnnnnnnnnnnnnnnnnnnnnnnnnnnnnnnnnnnnnnnnnnnnnnnnnnnnnnnnnnnnnnnnnnnnnnnnnnnnnnnnnnnnnnnnnnnnnnnnnnnnnnnnnnnnnnnnnnnnnnnnnnnnnnnnnnnnnnnnnnnnnnnnnnnnnnnnnnnnnnnnnnnnnnnnnnnnnnnnnnnnnnnnnnnnnnnnnnnnnnnnnnnnnnnnnnnnnnnnnnnnnnnnnnnnnnnnnnnnnnnnnnnnnnnnnnnnnnnnnnnnnnnnnnnnnnnnnnnnnnnnnnnnnnnnnnnnnnnnnnnnnnnnnnnnnnnnnnnnnnnnnnnnnnnnnnnnnnnnnnnnnnnnnnnnnnnnnnnnnnnnnnnnnnnnnnnnnnnnnnnnnnnnnnnnnnnnnnnnnnnnnnnnnnnnnnnnnnnnnnnnnnnnnnnnnnnnnnnnnnnnnnnnnnnnnnnnnnnnnnnnnnnnnnnnnnnnnnnnnnnnnnnnnnnnnnnnnnnnnnnnnnnnnnnnnnnnnnnnnnnnnnnnnnnnnnnnnnnnnnnnnnnnnnnnnnnnnnnnnnnnnnnnnnnnnnnnnnnnnnnnnnnnnnnnnnnnnnnnnnnnnnnnnnnnnnnnnnnnnnnnnnnnnnnnnnnnnnnnnnnnnnnnnnnnnnnnnnnnnnnnnnnnnnnnnnnnnnnnnnnnnnnnnnnnnnnnnnnnnnnnnnnnnnnnnnnnnnnnnnnnnnnnnnnnnnnnnnnnnnnnnnnnnnnnnnnnnnnnnnnnnnnnnnnnnnnnnnnnnnnnnnnnnnnnnnnnnnnnnnnnnnnnnnnnnnnnnnnnnnnnnnnnnnnnnnnnnnnnnnnnnnnnnnnnnnnnnnnnnnnnnnnnnnnnnnnnnnnnnnnnnnnnnnnnnnnnnnnnnnnnnnnnnnnnnnnnnnnnnnnnnnnnnnnnnnnnnnnnnnnnnnnnnnnnnnnnnnnnnnnnnnnnnnnnnnnnnnnnnnnnnnnnnnnnnnnnnnnnnnnnnnnnnnnnnnnnnnnnnnnnnnnnnnnnnnnnnnnnnnnnnnnnnnnnnnnnnnnnnnnnnnnnnnnnnnnnnnnnnnnnnnnnnnnnnnnnnnnnnnnnnnnnnnnnnnnnnnnnnnnnnnnnnnnnnnnnnnnnnnnnnnnnnnnnnnnnnnnnnnnnnnnnnnnnnnnnnnnnnnnnnnnnnnnnnnnnnnnnnnnnnnnnnnnnnnnnnnnnnnnnnnnnnnnnnnnnnnnnnnnnnnnnnnnnnnnnnnnnnnnnnnnnnnnnnnnnnnnnnnnnnnnnnnnnnnnnnnnnnnnnnnnnnnnnnnnnnnnnnnnnnnnnnnnnnnnnnnnnnnnnnnnnnnnnnnnnnnnnnnnnnnnnnnnnnnnnnnnnnnnnnnnnnnnnnnnnnnnnnnnnnnnnnnnnnnnnnnnnnnnnnnnnnnnnnnnnnnnnnnnnnnnnnnnnnnnnnnnnnnnnnnnnnnnnnnnnnnnnnnnnnnnnnnnnnnnnnnnnnnnnnnnnnnnnnnnnnnnnnnnnnnnnnnnnnnnnnnnnnnnnnnnnnnnnnnnnnnnnnnnnnnnnnnnnnnnnnnnnnnnnnnnnnnnnnnnnnnnnnnnnnnnnnnnnnnnnnnnnnnnnnnnnnnnnnnnnnnnnnnnnnnnnnnnnnnnnnnnnnnnnnnnnnnnnnnnnnnnnnnnnnnnnnnnnnnnnnnnnnnnnnnnnnnnnnnnnnnnnnnnnnnnnnnnnnnnnnnnnnnnnnnnnnnnnnnnnnnnnnnnnnnnnnnnnnnnnnnnnnnnnnnnnnnnnnnnnnnnnnnnnnnnnnnnnnnnnnnnnnnnnnnnnnnnnnnnnnnnnnnnnnnnnnnnnnnnnnnnnnnnnnnnnnnnnnnnnnnnnnnnnnnnnnnnnnnnnnnnnnnnnnnnnnnnnnnnnnnnnnnnnnnnnnnnnnnnnnnnnnnnnnnnnnnnnnnnnnnnnnnnnnnnnnnnnnnnnnnnnnnnnnnnnnnnnnnnnnnnnnnnnnnnnnnnnnnnnnnnnnnnnnnnnnnnnnnnnnnnnnnnnnnnnnnnnnnnnnnnnnnnnnnnnnnnnnnnnnnnnnnnnnnnnnnnnnnnnnnnnnnnnnnnnnnnnnnnnnnnnnnnnnnnnnnnnnnnnnnnnnnnnnnnnnnnnnnnnnnnnnnnnnnnnnnnnnnnnnnnnnnnnnnnnnnnnnnnnnnnnnnnnnnnnnnnnnnnnnnnnnnnnnnnnnnnnnnnnnnnnnnnnnnnnnnnnnnnnnnnnnnnnnnnnnnnnnnnnnnnnnnnnnnnnnnnnnnnnnnnnnnnnnnnnnnnnnnnnnnnnnnnnnnnnnnnnnnnnnnnnnnnnnnnnnnnnnnnnnnnnnnnnnnnnnnnnnnnnnnnnnnnnnnnnnnnnnnnnnnnnnnnnnnnnnnnnnnnnnnnnnnnnnnnnnnnnnnnnnnnnnnnnnnnnnnnnnnnnnnnnnnnnnnnnnnnnnnnnnnnnnnnnnnnnnnnnnnnnnnnnnnnnnnnnnnnnnnnnnnnnnnnnnnnnnnnnnnnnnnnnnnnnnnnnnnnnnnnnnnnnnnnnnnnnnnnnnnnnnnnnnnnnnnnnnnnnnnnnnnnnnnnnnnnnnnnnnnnnnnnnnnnnnnnnnnnnnnnnnnnnnnnnnnnnnnnnnnnnnnnnnnnnnnnnnnnnnnnnnnnnnnnnnnnnnnnnnnnnnnnnnnnnnnnnnnnnnnnnnnnnnnnnnnnnnnnnnnnnnnnnnnnnnnnnnnnnnnnnnnnnnnnnnnnnnnnnnnnnnnnnnnnnnnnnnnnnnnnnnnnnnnnnnnnnnnnnnnnnnnnnnnnnnnnnnnnnnnnnnnnnnnnnnnnnnnnnnnnnnnnnnnnnnnnnnnnnnnnnnnnnnnnnnnnnnnnnnnnnnnnnnnnnnnnnnnnnnnnnnnnnnnnnnnnnnnnnnnnnnnnnnnnnnnnnnnnnnnnnnnnnnnnnnnnnnnnnnnnnnnnnnnnnnnnnnnnnnnnnnnnnnnnnnnnnnnnnnnnnnnnnnnnnnnnnnnnnnnnnnnnnnnnnnnnnnnnnnnnnnnnnnnnnnnnnnnnnnnnnnnnnnnnnnnnnnnnnnnnnnnnnnnnnnnnnnnnnnnnnnnnnnnnnnnnnnnnnnnnnnnnnnnnnnnnnnnnnnnnnnnnnnnnnnnnnnnnnnnnnnnnnnnnnnnnnnnnnnnnnnnnnnnnnnnnnnnnnnnnnnnnnnnnnnnnnnnnnnnnnnnnnnnnnnnnnnnnnnnnnnnnnnnnnnnnnnnnnnnnnnnnnnnnnnnnnnnnnnnnnnnnnnnnnnnnnnnnnnnnnnnnnnnnnnnnnnnnnnnnnnnnnnnnnnnnnnnnnnnnnnnnnnnnnnnnnnnnnnnnnnnnnnnnnnnnnnnnnnnnnnnnnnnnnnnnnnnnnnnnnnnnnnnnnnnnnnnnnnnnnnnnnnnnnnnnnnnnnnnnnnnnnnnnnnnnnnnnnnnnnnnnnnnnnnnnnnnnnnnnnnnnnnnnnnnnnnnnnnnnnnnnnnnnnnnnnnnnnnnnnnnnnnnnnnnnnnnnnnnnnnnnnnnnnnnnnnnnnnnnnnnnnnnnnnnnnnnnnnnnnnnnnnnnnnnnnnnnnnnnnnnnnnnnnnnnnnnnnnnnnnnnnnnnnnnnnnnnnnnnnnnnnnnnnnnnnnnnnnnnnnnnnnnnnnnnnnnnnnnnnnnnnnnnnnnnnnnnnnnnnnnnnnnnnnnnnnnnnnnnnnnnnnnnnnnnnnnnnnnnnnnnnnnnnnnnnnnnnnnnnnnnnnnnnnnnnnnnnnnnnnnnnnnnnnnnnnnnnnnnnnnnnnnnnnnnnnnnnnnnnnnnnnnnnnnnnnnnnnnnnnnnnnnnnnnnnnnnnnnnnnnnnnnnnnnnnnnnnnnnnnnnnnnnnnnnnnnnnnnnnnnnnnnnnnnnnnnnnnnnnnnnnnnnnnnnnnnnnnnnnnnnnnnnnnnnnnnnnnnnnnnnnnnnnnnnnnnnnnnnnnnnnnnnnnnnnnnnnnnnnnnnnnnnnnnnnnnnnnnnnnnnnnnnnnnnnnnnnnnnnnnnnnnnnnnnnnnnnnnnnnnnnnnnnnnnnnnnnnnnnnnnnnnnnnnnnnnnnnnnnnnnnnnnnnnnnnnnnnnnnnnnnnnnnnnnnnnnnnnnnnnnnnnnnnnnnnnnnnnnnnnnnnnnnnnnnnnnnnnnnnnnnnnnnnnnnnnnnnnnnnnnnnnnnnnnnnnnnnnnnnnnnnnnnnnnnnnnnnnnnnnnnnnnnnnnnnnnnnnnnnnnnnnnnnnnnnnnnnnnnnnnnnnnnnnnnnnnnnnnnnnnnnnnnnnnnnnnnnnnnnnnnnnnnnnnnnnnnnnnnnnnnnnnnnnnnnnnnnnnnnnnnnnnnnnnnnnnnnnnnnnnnnnnnnnnnnnnnnnnnnnnnnnnnnnnnnnnnnnnnnnnnnnnnnnnnnnnnnnnnnnnnnnnnnnnnnnnnnnnnnnnnnnnnnnnnnnnnnnnnnnnnnnnnnnnnnnnnnnnnnnnnnnnnnnnnnnnnnnnnnnnnnnnnnnnnnnnnnnnnnnnnnnnnnnnnnnnnnnnnnnnnnnnnnnnnnnnnnnnnnnnnnnnnnnnnnnnnnnnnnnnnnnnnnnnnnnnnnnnnnnnnnnnnnnnnnnnnnnnnnnnnnnnnnnnnnnnnnnnnnnnnnnnnnnnnnnnnnnnnnnnnnnnnnnnnnnnnnnnnnnnnnnnnnnnnnnnnnnnnnnnnnnnnnnnnnnnnnnnnnnnnnnnnnnnnnnnnnnnnnnnnnnnnnnnnnnnnnnnnnnnnnnnnnnnnnnnnnnnnnnnnnnnnnnnnnnnnnnnnnnnnnnnnnnnnnnnnnnnnnnnnnnnnnnnnnnnnnnnnnnnnnnnnnnnnnnnnnnnnnnnnnnnnnnnnnnnnnnnnnnnnnnnnnnnnnnnnnnnnnnnnnnnnnnnnnnnnnnnnnnnnnnnnnnnnnnnnnnnnnnnnnnnnnnnnnnnnnnnnnnnnnnnnnnnnnnnnnnnnnnnnnnnnnnnnnnnnnnnnnnnnnnnnnnnnnnnnnnnnnnnnnnnnnnnnnnnnnnnnnnnnnnnnnnnnnnnnnnnnnnnnnnnnnnnnnnnnnnnnnnnnnnnnnnnnnnnnnnnnnnnnnnnnnnnnnnnnnnnnnnnnnnnnnnnnnnnnnnnnnnnnnnnnnnnnnnnnnnnnnnnnnnnnnnnnnnnnnnnnnnnnnnnnnnnnnnnnnnnnnnnnnnnnnnnnnnnnnnnnnnnnnnnnnnnnnnnnnnnnnnnnnnnnnnnnnnnnnnnnnnnnnnnnnnnnnnnnnnnnnnnnnnnnnnnnnnnnnnnnnnnnnnnnnnnnnnnnnnnnnnnnnnnnnnnnnnnnnnnnnnnnnnnnnnnnnnnnnnnnnnnnnnnnnnnnnnnnnnnnnnnnnnnnnnnnnnnnnnnnnnnnnnnnnnnnnnnnnnnnnnnnnnnnnnnnnnnnnnnnnnnnnnnnnnnnnnnnnnnnnnnnnnnnnnnnnnnnnnnnnnnnnnnnnnnnnnnnnnnnnnnnnnnnnnnnnnnnnnnnnnnnnnnnnnnnnnnnnnnnnnnnnnnnnnnnnnnnnnnnnnnnnnnnnnnnnnnnnnnnnnnnnnnnnnnnnnnnnnnnnnnnnnnnnnnnnnnnnnnnnnnnnnnnnnnnnnnnnnnnnnnnnnnnnnnnnnnnnnnnnnnnnnnnnnnnnnnnnnnnnnnnnnnnnnnnnnnnnnnnnnnnnnnnnnnnnnnnnnnnnnnnnnnnnnnnnnnnnnnnnnnnnnnnnnnnnnnnnnnnnnnnnnnnnnnnnnnnnnnnnnnnnnnnnnnnnnnnnnnnnnnnnnnnnnnnnnnnnnnnnnnnnnnnnnnnnnnnnnnnnnnnnnnnnnnnnnnnnnnnnnnnnnnnnnnnnnnnnnnnnnnnnnnnnnnnnnnnnnnnnnnnnnnnnnnnnnnnnnnnnnnnnnnnnnnnnnnnnnnnnnnnnnnnnnnnnnnnnnnnnnnnnnnnnnnnnnnnnnnnnnnnnnnnnnnnnnnnnnnnnnnnnnnnnnnnnnnnnnnnnnnnnnnnnnnnnnnnnnnnnnnnnnnnnnnnnnnnnnnnnnnnnnnnnnnnnnnnnnnnnnnnnnnnnnnnnnnnnnnnnnnnnnnnnnnnnnnnnnnnnnnnnnnnnnnnnnnnnnnnnnnnnnnnnnnnnnnnnnnnnnnnnnnnnnnnnnnnnnnnnnnnnnnnnnnnnnnnnnnnnnnnnnnnnnnnnnnnnnnnnnnnnnnnnnnnnnnnnnnnnnnnnnnnnnnnnnnnnnnnnnnnnnnnnnnnnnnnnnnnnnnnnnnnnnnnnnnnnnnnnnnnnnnnnnnnnnnnnnnnnnnnnnnnnnnnnnnnnnnnnnnnnnnnnnnnnnnnnnnnnnnnnnnnnnnnnnnnnnnnnnnnnnnnnnnnnnnnnnnnnnnnnnnnnnnnnnnnnnnnnnnnnnnnnnnnnnnnnnnnnnnnnnnnnnnnnnnnnnnnnnnnnnnnnnnnnnnnnnnnnnnnnnnnnnnnnnnnnnnnnnnnnnnnnnnnnnnnnnnnnnnnnnnnnnnnnnnnnnnnnnnnnnnnnnnnnnnnnnnnnnnnnnnnnnnnnnnnnnnnnnnnnnnnnnnnnnnnnnnnnnnnnnnnnnnnnnnnnnnnnnnnnnnnnnnnnnnnnnnnnnnnnnnnnnnnnnnnnnnnnnnnnnnnnnnnnnnnnnnnnnnnnnnnnnnnnnnnnnnnnnnnnnnnnnnnnnnnnnnnnnnnnnnnnnnnnnnnnnnnnnnnnnnnnnnnnnnnnnnnnnnnnnnnnnnnnnnnnnnnnnnnnnnnnnnnnnnnnnnnnnnnnnnnnnnnnnnnnnnnnnnnnnnnnnnnnnnnnnnnnnnnnnnnnnnnnnnnnnnnnnnnnnnnnnnnnnnnnnnnnnnnnnnnnnnnnnnnnnnnnnnnnnnnnnnnnnnnnnnnnnnnnnnnnnnnnnnnnnnnnnnnnnnnnnnnnnnnnnnnnnnnnnnnnnnnnnnnnnnnnnnnnnnnnnnnnnnnnnnnnnnnnnnnnnnnnnnnnnnnnnnnnnnnnnnnnnnnnnnnnnnnnnnnnnnnnnnnnnnnnnnnnnnnnnnnnnnnnnnnnnnnnnnnnnnnnnnnnnnnnnnnnnnnnnnnnnnnnnnnnnnnnnnnnnnnnnnnnnnnnnnnnnnnnnnnnnnnnnnnnnnnnnnnnnnnnnnnnnnnnnnnnnnnnnnnnnnnnnnnnnnnnnnnnnnnnnnnnnnnnnnnnnnnnnnnnnnnnnnnnnnnnnnnnnnnnnnnnnnnnnnnnnnnnnnnnnnnnnnnnnnnnnnnnnnnnnnnnnnnnnnnnnnnnnnnnnnnnnnnnnnnnnnnnnnnnnnnnnnnnnnnnnnnnnnnnnnnnnnnnnnnnnnnnnnnnnnnnnnnnnnnnnnnnnnnnnnnnnnnnnnnnnnnnnnnnnnnnnnnnnnnnnnnnnnnnnnnnnnnnnnnnnnnnnnnnnnnnnnnnnnnnnnnnnnnnnnnnnnnnnnnnnnnnnnnnnnnnnnnnnnnnnnnnnnnnnnnnnnnnnnnnnnnnnnnnnnnnnnnnnnnnnnnnnnnnnnnnnnnnnnnnnnnnnnnnnnnnnnnnnnnnnnnnnnnnnnnnnnnnnnnnnnnnnnnnnnnnnnnnnnnnnnnnnnnnnnnnnnnnnnnnnnnnnnnnnnnnnnnnnnnnnnnnnnnnnnnnnnnnnnnnnnnnnnnnnnnnnnnnnnnnnnnnnnnnnnnnnnnnnnnnnnnnnnnnnnnnnnnnnnnnnnnnnnnnnnnnnnnnnnnnnnnnnnnnnnnnnnnnnnnnnnnnnnnnnnnnnnnnnnnnnnnnnnnnnnnnnnnnnnnnnnnnnnnnnnnnnnnnnnnnnnnnnnnnnnnnnnnnnnnnnnnnnnnnnnnnnnnnnnnnnnnnnnnnnnnnnnnnnnnnnnnnnnnnnnnnnnnnnnnnnnnnnnnnnnnnnnnnnnnnnnnnnnnnnnnnnnnnnnnnnnnnnnnnnnnnnnnnnnnnnnnnnnnnnnnnnnnnnnnnnnnnnnnnnnnnnnnnnnnnnnnnnnnnnnnnnnnnnnnnnnnnnnnnnnnnnnnnnnnnnnnnnnnnnnnnnnnnnnnnnnnnnnnnnnnnnnnnnnnnnnnnnnnnnnnnnnnnnnnnnnnnnnnnnnnnnnnnnnnnnnnnnnnnnnnnnnnnnnnnnnnnnnnnnnnnnnnnnnnnnnnnnnnnnnnnnnnnnnnnnnnnnnnnnnnnnnnnnnnnnnnnnnnnnnnnnnnnnnnnnnnnnnnnnnnnnnnnnnnnnnnnnnnnnnnnnnnnnnnnnnnnnnnnnnnnnnnnnnnnnnnnnnnnnnnnnnnnnnnnnnnnnnnnnnnnnnnnnnnnnnnnnnnnnnnnnnnnnnnnnnnnnnnnnnnnnnnnnnnnnnnnnnnnnnnnnnnnnnnnnnnnnnnnnnnnnnnnnnnnnnnnnnnnnnnnnnnnnnnnnnnnnnnnnnnnnnnnnnnnnnnnnnnnnnnnnnnnnnnnnnnnnnnnnnnnnnnnnnnnnnnnnnnnnnnnnnnnnnnnnnnnnnnnnnnnnnnnnnnnnnnnnnnnnnnnnnnnnnnnnnnnnnnnnnnnnnnnnnnnnnnnnnnnnnnnnnnnnnnnnnnnnnnnnnnnnnnnnnnnnnnnnnnnnnnnnnnnnnnnnnnnnnnnnnnnnnnnnnnnnnnnnnnnnnnnnnnnnnnnnnnnnnnnnnnnnnnnnnnnnnnnnnnnnnnnnnnnnnnnnnnnnnnnnnnnnnnnnnnnnnnnnnnnnnnnnnnnnnnnnnnnnnnnnnnnnnnnnnnnnnnnnnnnnnnnnnnnnnnnnnnnnnnnnnnnnnnnnnnnnnnnnnnnnnnnnnnnnnnnnnnnnnnnnnnnnnnnnnnnnnnnnnnnnnnnnnnnnnnnnnnnnnnnnnnnnnnnnnnnnnnnnnnnnnnnnnnnnnnnnnnnnnnnnnnnnnnnnnnnnnnnnnnnnnnnnnnnnnnnnnnnnnnnnnnnnnnnnnnnnnnnnnnnnnnnnnnnnnnnnnnnnnnnnnnnnnnnnnnnnnnnnnnnnnnnnnnnnnnnnnnnnnnnnnnnnnnnnnnnnnnnnnnnnnnnnnnnnnnnnnnnnnnnnnnnnnnnnnnnnnnnnnnnnnnnnnnnnnnnnnnnnnnnnnnnnnnnnnnnnnnnnnnnnnnnnnnnnnnnnnnnnnnnnnnnnnnnnnnnnnnnnnnnnnnnnnnnnnnnnnnnnnnnnnnnnnnnnnnnnnnnnnnnnnnnnnnnnnnnnnnnnnnnnnnnnnnnnnnnnnnnnnnnnnnnnnnnnnnnnnnnnnnnnnnnnnnnnnnnnnnnnnnnnnnnnnnnnnnnnnnnnnnnnnnnnnnnnnnnnnnnnnnnnnnnnnnnnnnnnnnnnnnnnnnnnnnnnnnnnnnnnnnnnnnnnnnnnnnnnnnnnnnnnnnnnnnnnnnnnnnnnnnnnnnnnnnnnnnnnnnnnnnnnnnnnnnnnnnnnnnnnnnnnnnnnnnnnnnnnnnnnnnnnnnnnnnnnnnnnnnnnnnnnnnnnnnnnnnnnnnnnnnnnnnnnnnnnnnnnnnnnnnnnnnnnnnnnnnnnnnnnnnnnnnnnnnnnnnnnnnnnnnnnnnnnnnnnnnnnnnnnnnnnnnnnnnnnnnnnnnnnnnnnnnnnnnnnnnnnnnnnnnnnnnnnnnnnnnnnnnnnnnnnnnnnnnnnnnnnnnnnnnnnnnnnnnnnnnnnnnnnnnnnnnnnnnnnnnnnnnnnnnnnnnnnnnnnnnnnnnnnnnnnnnnnnnnnnnnnnnnnnnnnnnnnnnnnnnnnnnnnnnnnnnnnnnnnnnnnnnnnnnnnnnnnnnnnnnnnnnnnnnnnnnnnnnnnnnnnnnnnnnnnnnnnnnnnnnnnnnnnnnnnnnnnnnnnnnnnnnnnnnnnnnnnnnnnnnnnnnnnnnnnnnnnnnnnnnnnnnnnnnnnnnnnnnnnnnnnnnnnnnnnnnnnnnnnnnnnnnnnnnnnnnnnnnnnnnnnnnnnnnnnnnnnnnnnnnnnnnnnnnnnnnnnnnnnnnnnnnnnnnnnnnnnnnnnnnnnnnnnnnnnnnnnnnnnnnnnnnnnnnnnnnnnnnnnnnnnnnnnnnnnnnnnnnnnnnnnnnnnnnnnnnnnnnnnnnnnnnnnnnnnnnnnnnnnnnnnnnnnnnnnnnnnnnnnnnnnnnnnnnnnnnnnnnnnnnnnnnnnnnnnnnnnnnnnnnnnnnnnnnnnnnnnnnnnnnnnnnnnnnnnnnnnnnnnnnnnnnnnnnnnnnnnnnnnnnnnnnnnnnnnnnnnnnnnnnnnnnnnnnnnnnnnnnnnnnnnnnnnnnnnnnnnnnnnnnnnnnnnnnnnnnnnnnnnnnnnnnnnnnnnnnnnnnnnnnnnnnnnnnnnnnnnnnnnnnnnnnnnnnnnnnnnnnnnnnnnnnnnnnnnnnnnnnnnnnnnnnnnnnnnnnnnnnnnnnnnnnnnnnnnnnnnnnnnnnnnnnnnnnnnnnnnnnnnnnnnnnnnnnnnnnnnnnnnnnnnnnnnnnnnnnnnnnnnnnnnnnnnnnnnnnnnnnnnnnnnnnnnnnnnnnnnnnnnnnnnnnnnnnnnnnnnnnnnnnnnnnnnnnnnnnnnnnnnnnnnnnnnnnnnnnnnnnnnnnnnnnnnnnnnnnnnnnnnnnnnnnnnnnnnnnnnnnnnnnnnnnnnnnnnnnnnnnnnnnnnnnnnnnnnnnnnnnnnnnnnnnnnnnnnnnnnnnnnnnnnnnnnnnnnnnnnnnnnnnnnnnnnnnnnnnnnnnnnnnnnnnnnnnnnnnnnnnnnnnnnnnnnnnnnnnnnnnnnnnnnnnnnnnnnnnnnnnnnnnnnnnnnnnnnnnnnnnnnnnnnnnnnnnnnnnnnnnnnnnnnnnnnnnnnnnnnnnnnnnnnnnnnnnnnnnnnnnnnnnnnnnnnnnnnnnnnnnnnnnnnnnnnnnnnnnnnnnnnnnnnnnnnnnnnnnnnnnnnnnnnnnnnnnnnnnnnnnnnnnnnnnnnnnnnnnnnnnnnnnnnnnnnnnnnnnnnnnnnnnnnnnnnnnnnnnnnnnnnnnnnnnnnnnnnnnnnnnnnnnnnnnnnnnnnnnnnnnnnnnnnnnnnnnnnnnnnnnnnnnnnnnnnnnnnnnnnnnnnnnnnnnnnnnnnnnnnnnnnnnnnnnnnnnnnnnnnnnnnnnnnnnnnnnnnnnnnnnnnnnnnnnnnnnnnnnnnnnnnnnnnnnnnnnnnnnnnnnnnnnnnnnnnnnnnnnnnnnnnnnnnnnnnnnnnnnnnnnnnnnnnnnnnnnnnnnnnnnnnnnnnnnnnnnnnnnnnnnnnnnnnnnnnnnnnnnnnnnnnnnnnnnnnnnnnnnnnnnnnnnnnnnnnnnnnnnnnnnnnnnnnnnnnnnnnnnnnnnnnnnnnnnnnnnnnnnnnnnnnnnnnnnnnnnnnnnnnnnnnnnnnnnnnnnnnnnnnnnnnnnnnnnnnnnnnnnnnnnnnnnnnnnnnnnnnnnnnnnnnnnnnnnnnnnnnnnnnnnnnnnnnnnnnnnnnnnnnnnnnnnnnnnnnnnnnnnnnnnnnnnnnnnnnnnnnnnnnnnnnnnnnnnnnnnnnnnnnnnnnnnnnnnnnnnnnnnnnnnnnnnnnnnnnnnnnnnnnnnnnnnnnnnnnnnnnnnnnnnnnnnnnnnnnnnnnnnnnnnnnnnnnnnnnnnnnnnnnnnnnnnnnnnnnnnnnnnnnnnnnnnnnnnnnnnnnnnnnnnnnnnnnnnnnnnnnnnnnnnnnnnnnnnnnnnnnnnnnnnnnnnnnnnnnnnnnnnnnnnnnnnnnnnnnnnnnnnnnnnnnnnnnnnnnnnnnnnnnnnnnnnnnnnnnnnnnnnnnnnnnnnnnnnnnnnnnnnnnnnnnnnnnnnnnnnnnnnnnnnnnnnnnnnnnnnnnnnnnnnnnnnnnnnnnnnnnnnnnnnnnnnnnnnnnnnnnnnnnnnnnnnnnnnnnnnnnnnnnnnnnnnnnnnnnnnnnnnnnnnnnnnnnnnnnnnnnnnnnnnnnnnnnnnnnnnnnnnnnnnnnnnnnnnnnnnnnnnnnnnnnnnnnnnnnnnnnnnnnnnnnnnnnnnnnnnnnnnnnnnnnnnnnnnnnnnnnnnnnnnnnnnnnnnnnnnnnnnnnnnnnnnnnnnnnnnnnnnnnnnnnnnnnnnnnnnnnnnnnnnnnnnnnnnnnnnnnnnnnnnnnnnnnnnnnnnnnnnnnnnnnnnnnnnnnnnnnnnnnnnnnnnnnnnnnnnnnnnnnnnnnnnnnnnnnnnnnnnnnnnnnnnnnnnnnnnnnnnnnnnnnnnnnnnnnnnnnnnnnnnnnnnnnnnnnnnnnnnnnnnnnnnnnnnnnnnnnnnnnnnnnnnnnnnnnnnnnnnnnnnnnnnnnnnnnnnnnnnnnnnnnnnnnnnnnnnnnnnnnnnnnnnnnnnnnnnnnnnnnnnnnnnnnnnnnnnnnnnnnnnnnnnnnnnnnnnnnnnnnnnnnnnnnnnnnnnnnnnnnnnnnnnnnnnnnnnnnnnnnnnnnnnnnnnnnnnnnnnnnnnnnnnnnnnnnnnnnnnnnnnnnnnnnnnnnnnnnnnnnnnnnnnnnnnnnnnnnnnnnnnnnnnnnnnnnnnnnnnnnnnnnnnnnnnnnnnnnnnnnnnnnnnnnnnnnnnnnnnnnnnnnnnnnnnnnnnnnnnnnnnnnnnnnnnnnnnnnnnnnnnnnnnnnnnnnnnnnnnnnnnnnnnnnnnnnnnnnnnnnnnnnnnnnnnnnnnnnnnnnnnnnnnnnnnnnnnnnnnnnnnnnnnnnnnnnnnnnnnnnnnnnnnnnnnnnnnnnnnnnnnnnnnnnnnnnnnnnnnnnnnnnnnnnnnnnnnnnnnnnnnnnnnnnnnnnnnnnnnnnnnnnnnnnnnnnnnnnnnnnnnnnnnnnnnnnnnnnnnnnnnnnnnnnnnnnnnnnnnnnnnnnnnnnnnnnnnnnnnnnnnnnnnnnnnnnnnnnnnnnnnnnnnnnnnnnnnnnnnnnnnnnnnnnnnnnnnnnnnnnnnnnnnnnnnnnnnnnnnnnnnnnnnnnnnnnnnnnnnnnnnnnnnnnnnnnnnnnnnnnnnnnnnnnnnnnnnnnnnnnnnnnnnnnnnnnnnnnnnnnnnnnnnnnnnnnnnnnnnnnnnnnnnnnnnnnnnnnnnnnnnnnnnnnnnnnnnnnnnnnnnnnnnnnnnnnnnnnnnnnnnnnnnnnnnnnnnnnnnnnnnnnnnnnnnnnnnnnnnnnnnnnnnnnnnnnnnnnnnnnnnnnnnnnnnnnnnnnnnnnnnnnnnnnnnnnnnnnnnnnnnnnnnnnnnnnnnnnnnnnnnnnnnnnnnnnnnnnnnnnnnnnnnnnnnnnnnnnnnnnnnnnnnnnnnnnnnnnnnnnnnnnnnnnnnnnnnnnnnnnnnnnnnnnnnnnnnnnnnnnnnnnnnnnnnnnnnnnnnnnnnnnnnnnnnnnnnnnnnnnnnnnnnnnnnnnnnnnnnnnnnnnnnnnnnnnnnnnnnnnnnnnnnnnnnnnnnnnnnnnnnnnnnnnnnnnnnnnnnnnnnnnnnnnnnnnnnnnnnnnnnnnnnnnnnnnnnnnnnnnnnnnnnnnnnnnnnnnnnnnnnnnnnnnnnnnnnnnnnnnnnnnnnnnnnnnnnnnnnnnnnnnnnnnnnnnnnnnnnnnnnnnnnnnnnnnnnnnnnnnnnnnnnnnnnnnnnnnnnnnnnnnnnnnnnnnnnnnnnnnnnnnnnnnnnnnnnnnnnnnnnnnnnnnnnnnnnnnnnnnnnnnnnnnnnnnnnnnnnnnnnnnnnnnnnnnnnnnnnnnnnnnnnnnnnnnnnnnnnnnnnnnnnnnnnnnnnnnnnnnnnnnnnnnnnnnnnnnnnnnnnnnnnnnnnnnnnnnnnnnnnnnnnnnnnnnnnnnnnnnnnnnnnnnnnnnnnnnnnnnnnnnnnnnnnnnnnnnnnnnnnnnnnnnnnnnnnnnnnnnnnnnnnnnnnnnnnnnnnnnnnnnnnnnnnnnnnnnnnnnnnnnnnnnnnnnnnnnnnnnnnnnnnnnnnnnnnnnnnnnnnnnnnnnnnnnnnnnnnnnnnnnnnnnnnnnnnnnnnnnnnnnnnnnnnnnnnnnnnnnnnnnnnnnnnnnnnnnnnnnnnnnnnnnnnnnnnnnnnnnnnnnnnnnnnnnnnnnnnnnnnnnnnnnnnnnnnnnnnnnnnnnnnnnnnnnnnnnnnnnnnnnnnnnnnnnnnnnnnnnnnnnnnnnnnnnnnnnnnnnnnnnnnnnnnnnnnnnnnnnnnnnnnnnnnnnnnnnnnnnnnnnnnnnnnnnnnnnnnnnnnnnnnnnnnnnnnnnnnnnnnnnnnnnnnnnnnnnnnnnnnnnnnnnnnnnnnnnnnnnnnnnnnnnnnnnnnnnnnnnnnnnnnnnnnnnnnnnnnnnnnnnnnnnnnnnnnnnnnnnnnnnnnnnnnnnnnnnnnnnnnnnnnnnnnnnnnnnnnnnnnnnnnnnnnnnnnnnnnnnnnnnnnnnnnnnnnnnnnnnnnnnnnnnnnnnnnnnnnnnnnnnnnnnnnnnnnnnnnnnnnnnnnnnnnnnnnnnnnnnnnnnnnnnnnnnnnnnnnnnnnnnnnnnnnnnnnnnnnnnnnnnnnnnnnnnnnnnnnnnnnnnnnnnnnnnnnnnnnnnnnnnnnnnnnnnnnnnnnnnnnnnnnnnnnnnnnnnnnnnnnnnnnnnnnnnnnnnnnnnnnnnnnnnnnnnnnnnnnnnnnnnnnnnnnnnnnnnnnnnnnnnnnnnnnnnnnnnnnnnnnnnnnnnnnnnnnnnnnnnnnnnnnnnnnnnnnnnnnnnnnnnnnnnnnnnnnnnnnnnnnnnnnnnnnnnnnnnnnnnnnnnnnnnnnnnnnnnnnnnnnnnnnnnnnnnnnnnnnnnnnnnnnnnnnnnnnnnnnnnnnnnnnnnnnnnnnnnnnnnnnnnnnnnnnnnnnnnnnnnnnnnnnnnnnnnnnnnnnnnnnnnnnnnnnnnnnnnnnnnnnnnnnnnnnnnnnnnnnnnnnnnnnnnnnnnnnnnnnnnnnnnnnnnnnnnnnnnnnnnnnnnnnnnnnnnnnnnnnnnnnnnnnnnnnnnnnnnnnnnnnnnnnnnnnnnnnnnnnnnnnnnnnnnnnnnnnnnnnnnnnnnnnnnnnnnnnnnnnnnnnnnnnnnnnnnnnnnnnnnnnnnnnnnnnnnnnnnnnnnnnnnnnnnnnnnnnnnnnnnnnnnnnnnnnnnnnnnnnnnnnnnnnnnnnnnnnnnnnnnnnnnnnnnnnnnnnnnnnnnnnnnnnnnnnnnnnnnnnnnnnnnnnnnnnnnnnnnnnnnnnnnnnnnnnnnnnnnnnnnnnnnnnnnnnnnnnnnnnnnnnnnnnnnnnnnnnnnnnnnnnnnnnnnnnnnnnnnnnnnnnnnnnnnnnnnnnnnnnnnnnnnnnnnnnnnnnnnnnnnnnnnnnnnnnnnnnnnnnnnnnnnnnnnnnnnnnnnnnnnnnnnnnnnnnnnnnnnnnnnnnnnnnnnnnnnnnnnnnnnnnnnnnnnnnnnnnnnnnnnnnnnnnnnnnnnnnnnnnnnnnnnnnnnnnnnnnnnnnnnnnnnnnnnnnnnnnnnnnnnnnnnnnnnnnnnnnnnnnnnnnnnnnnnnnnnnnnnnnnnnnnnnnnnnnnnnnnnnnnnnnnnnnnnnnnnnnnnnnnnnnnnnnnnnnnnnnnnnnnnnnnnnnnnnnnnnnnnnnnnnnnnnnnnnnnnnnnnnnnnnnnnnnnnnnnnnnnnnnnnnnnnnnnnnnnnnnnnnnnnnnnnnnnnnnnnnnnnnnnnnnnnnnnnnnnnnnnnnnnnnnnnnnnnnnnnnnnnnnnnnnnnnnnnnnnnnnnnnnnnnnnnnnnnnnnnnnnnnnnnnnnnnnnnnnnnnnnnnnnnnnnnnnnnnnnnnnnnnnnnnnnnnnnnnnnnnnnnnnnnnnnnnnnnnnnnnnnnnnnnnnnnnnnnnnnnnnnnnnnnnnnnnnnnnnnnnnnnnnnnnnnnnnnnnnnnnnnnnnnnnnnnnnnnnnnnnnnnnnnnnnnnnnnnnnnnnnnnnnnnnnnnnnnnnnnnnnnnnnnnnnnnnnnnnnnnnnnnnnnnnnnnnnnnnnnnnnnnnnnnnnnnnnnnnnnnnnnnnnnnnnnnnnnnnnnnnnnnnnnnnnnnnnnnnnnnnnnnnnnnnnnnnnnnnnnnnnnnnnnnnnnnnnnnnnnnnnnnnnnnnnnnnnnnnnnnnnnnnnnnnnnnnnnnnnnnnnnnnnnnnnnnnnnnnnnnnnnnnnnnnnnnnnnnnnnnnnnnnnnnnnnnnnnnnnnnnnnnnnnnnnnnnnnnnnnnnnnnnnnnnnnnnnnnnnnnnnnnnnnnnnnnnnnnnnnnnnnnnnnnnnnnnnnnnnnnnnnnnnnnnnnnnnnnnnnnnnnnnnnnnnnnnnnnnnnnnnnnnnnnnnnnnnnnnnnnnnnnnnnnnnnnnnnnnnnnnnnnnnnnnnnnnnnnnnnnnnnnnnnnnnnnnnnnnnnnnnnnnnnnnnnnnnnnnnnnnnnnnnnnnnnnnnnnnnnnnnnnnnnnnnnnnnnnnnnnnnnnnnnnnnnnnnnnnnnnnnnnnnnnnnnnnnnnnnnnnnnnnnnnnnnnnnnnnnnnnnnnnnnnnnnnnnnnnnnnnnnnnnnnnnnnnnnnnnnnnnnnnnnnnnnnnnnnnnnnnnnnnnnnnnnnnnnnnnnnnnnnnnnnnnnnnnnnnnnnnnnnnnnnnnnnnnnnnnnnnnnnnnnnnnnnnnnnnnnnnnnnnnnnnnnnnnnnnnnnnnnnnnnnnnnnnnnnnnnnnnnnnnnnnnnnnnnnnnnnnnnnnnnnnnnnnnnnnnnnnnnnnnnnnnnnnnnnnnnnnnnnnnnnnnnnnnnnnnnnnnnnnnnnnnnnnnnnnnnnnnnnnnnnnnnnnnnnnnnnnnnnnnnnnnnnnnnnnnnnnnnnnnnnnnnnnnnnnnnnnnnnnnnnnnnnnnnnnnnnnnnnnnnnnnnnnnnnnnnnnnnnnnnnnnnnnnnnnnnnnnnnnnnnnnnnnnnnnnnnnnnnnnnnnnnnnnnnnnnnnnnnnnnnnnnnnnnnnnnnnnnnnnnnnnnnnnnnnnnnnnnnnnnnnnnnnnnnnnnnnnnnnnnnnnnnnnnnnnnnnnnnnnnnnnnnnnnnnnnnnnnnnnnnnnnnnnnnnnnnnnnnnnnnnnnnnnnnnnnnnnnnnnnnnnnnnnnnnnnnnnnnnnnnnnnnnnnnnnnnnnnnnnnnnnnnnnnnnnnnnnnnnnnnnnnnnnnnnnnnnnnnnnnnnnnnnnnnnnnnnnnnnnnnnnnnnnnnnnnnnnnnnnnnnnnnnnnnnnnnnnnnnnnnnnnnnnnnnnnnnnnnnnnnnnnnnnnnnnnnnnnnnnnnnnnnnnnnnnnnnnnnnnnnnnnnnnnnnnnnnnnnnnnnnnnnnnnnnnnnnnnnnnnnnnnnnnnnnnnnnnnnnnnnnnnnnnnnnnnnnnnnnnnnnnnnnnnnnnnnnnnnnnnnnnnnnnnnnnnnnnnnnnnnnnnnnnnnnnnnnnnnnnnnnnnnnnnnnnnnnnnnnnnnnnnnnnnnnnnnnnnnnnnnnnnnnnnnnnnnnnnnnnnnnnnnnnnnnnnnnnnnnnnnnnnnnnnnnnnnnnnnnnnnnnnnnnnnnnnnnnnnnnnnnnnnnnnnnnnnnnnnnnnnnnnnnnnnnnnnnnnnnnnnnnnnnnnnnnnnnnnnnnnnnnnnnnnnnnnnnnnnnnnnnnnnnnnnnnnnnnnnnnnnnnnnnnnnnnnnnnnnnnnnnnnnnnnnnnnnnnnnnnnnnnnnnnnnnnnnnnnnnnnnnnnnnnnnnnnnnnnnnnnnnnnnnnnnnnnnnnnnnnnnnnnnnnnnnnnnnnnnnnnnnnnnnnnnnnnnnnnnnnnnnnnnnnnnnnnnnnnnnnnnnnnnnnnnnnnnnnnnnnnnnnnnnnnnnnnnnnnnnnnnnnnnnnnnnnnnnnnnnnnnnnnnnnnnnnnnnnnnnnnnnnnnnnnnnnnnnnnnnnnnnnnnnnnnnnnnnnnnnnnnnnnnnnnnnnnnnnnnnnnnnnnnnnnnnnnnnnnnnnnnnnnnnnnnnnnnnnnnnnnnnnnnnnnnnnnnnnnnnnnnnnnnnnnnnnnnnnnnnnnnnnnnnnnnnnnnnnnnnnnnnnnnnnnnnnnnnnnnnnnnnnnnnnnnnnnnnnnnnnnnnnnnnnnnnnnnnnnnnnnnnnnnnnnnnnnnnnnnnnnnnnnnnnnnnnnnnnnnnnnnnnnnnnnnnnnnnnnnnnnnnnnnnnnnnnnnnnnnnnnnnnnnnnnnnnnnnnnnnnnnnnnnnnnnnnnnnnnnnnnnnnnnnnnnnnnnnnnnnnnnnnnnnnnnnnnnnnnnnnnnnnnnnnnnnnnnnnnnnnnnnnnnnnnnnnnnnnnnnnnnnnnnnnnnnnnnnnnnnnnnnnnnnnnnnnnnnnnnnnnnnnnnnnnnnnnnnnnnnnnnnnnnnnnnnnnnnnnnnnnnnnnnnnnnnnnnnnnnnnnnnnnnnnnnnnnnnnnnnnnnnnnnnnnnnnnnnnnnnnnnnnnnnnnnnnnnnnnnnnnnnnnnnnnnnnnnnnnnnnnnnnnnnnnnnnnnnnnnnnnnnnnnnnnnnnnnnnnnnnnnnnnnnnnnnnnnnnnnnnnnnnnnnnnnnnnnnnnnnnnnnnnnnnnnnnnnnnnnnnnnnnnnnnnnnnnnnnnnnnnnnnnnnnnnnnnnnnnnnnnnnnnnnnnnnnnnnnnnnnnnnnnnnnnnnnnnnnnnnnnnnnnnnnnnnnnnnnnnnnnnnnnnnnnnnnnnnnnnnnnnnnnnnnnnnnnnnnnnnnnnnnnnnnnnnnnnnnnnnnnnnnnnnnnnnnnnnnnnnnnnnnnnnnnnnnnnnnnnnnnnnnnnnnnnnnnnnnnnnnnnnnnnnnnnnnnnnnnnnnnnnnnnnnnnnnnnnnnnnnnnnnnnnnnnnnnnnnnnnnnnnnnnnnnnnnnnnnnnnnnnnnnnnnnnnnnnnnnnnnnnnnnnnnnnnnnnnnnnnnnnnnnnnnnnnnnnnnnnnnnnnnnnnnnnnnnnnnnnnnnnnnnnnnnnnnnnnnnnnnnnnnnnnnnnnnnnnnnnnnnnnnnnnnnnnnnnnnnnnnnnnnnnnnnnnnnnnnnnnnnnnnnnnnnnnnnnnnnnnnnnnnnnnnnnnnnnnnnnnnnnnnnnnnnnnnnnnnnnnnnnnnnnnnnnnnnnnnnnnnnnnnnnnnnnnnnnnnnnnnnnnnnnnnnnnnnnnnnnnnnnnnnnnnnnnnnnnnnnnnnnnnnnnnnnnnnnnnnnnnnnnnnnnnnnnnnnnnnnnnnnnnnnnnnnnnnnnnnnnnnnnnnnnnnnnnnnnnnnnnnnnnnnnnnnnnnnnnnnnnnnnnnnnnnnnnnnnnnnnnnnnnnnnnnnnnnnnnnnnnnnnnnnnnnnnnnnnnnnnnnnnnnnnnnnnnnnnnnnnnnnnnnnnnnnnnnnnnnnnnnnnnnnnnnnnnnnnnnnnnnnnnnnnnnnnnnnnnnnnnnnnnnnnnnnnnnnnnnnnnnnnnnnnnnnnnnnnnnnnnnnnnnnnnnnnnnnnnnnnnnnnnnnnnnnnnnnnnnnnnnnnnnnnnnnnnnnnnnnnnnnnnnnnnnnnnnnnnnnnnnnnnnnnnnnnnnnnnnnnnnnnnnnnnnnnnnnnnnnnnnnnnnnnnnnnnnnnnnnnnnnnnnnnnnnnnnnnnnnnnnnnnnnnnnnnnnnnnnnnnnnnnnnnnnnnnnnnnnnnnnnnnnnnnnnnnnnnnnnnnnnnnnnnnnnnnnnnnnnnnnnnnnnnnnnnnnnnnnnnnnnnnnnnnnnnnnnnnnnnnnnnnnnnnnnnnnnnnnnnnnnnnnnnnnnnnnnnnnnnnnnnnnnnnnnnnnnnnnnnnnnnnnnnnnnnnnnnnnnnnnnnnnnnnnnnnnnnnnnnnnnnnnnnnnnnnnnnnnnnnnnnnnnnnnnnnnnnnnnnnnnnnnnnnnnnnnnnnnnnnnnnnnnnnnnnnnnnnnnnnnnnnnnnnnnnnnnnnnnnnnnnnnnnnnnnnnnnnnnnnnnnnnnnnnnnnnnnnnnnnnnnnnnnnnnnnnnnnnnnnnnnnnnnnnnnnnnnnnnnnnnnnnnnnnnnnnnnnnnnnnnnnnnnnnnnnnnnnnnnnnnnnnnnnnnnnnnnnnnnnnnnnnnnnnnnnnnnnnnnnnnnnnnnnnnnnnnnnnnnnnnnnnnnnnnnnnnnnnnnnnnnnnnnnnnnnnnnnnnnnnnnnnnnnnnnnnnnnnnnnnnnnnnnnnnnnnnnnnnnnnnnnnnnnnnnnnnnnnnnnnnnnnnnnnnnnnnnnnnnnnnnnnnnnnnnnnnnnnnnnnnnnnnnnnnnnnnnnnnnnnnnnnnnnnnnnnnnnnnnnnnnnnnnnnnnnnnnnnnnnnnnnnnnnnnnnnnnnnnnnnnnnnnnnnnnnnnnnnnnnnnnnnnnnnnnnnnnnnnnnnnnnnnnnnnnnnnnnnnnnnnnnnnnnnnnnnnnnnnnnnnnnnnnnnnnnnnnnnnnnnnnnnnnnnnnnnnnnnnnnnnnnnnnnnnnnnnnnnnnnnnnnnnnnnnnnnnnnnnnnnnnnnnnnnnnnnnnnnnnnnnnnnnnnnnnnnnnnnnnnnnnnnnnnnnnnnnnnnnnnnnnnnnnnnnnnnnnnnnnnnnnnnnnnnnnnnnnnnnnnnnnnnnnnnnnnnnnnnnnnnnnnnnnnnnnnnnnnnnnnnnnnnnnnnnnnnnnnnnnnnnnnnnnnnnnnnnnnnnnnnnnnnnnnnnnnnnnnnnnnnnnnnnnnnnnnnnnnnnnnnnnnnnnnnnnnnnnnnnnnnnnnnnnnnnnnnnnnnnnnnnnnnnnnnnnnnnnnnnnnnnnnnnnnnnnnnnnnnnnnnnnnnnnnnnnnnnnnnnnnnnnnnnnnnnnnnnnnnnnnnnnnnnnnnnnnnnnnnnnnnnnnnnnnnnnnnnnnnnnnnnnnnnnnnnnnnnnnnnnnnnnnnnnnnnnnnnnnnnnnnnnnnnnnnnnnnnnnnnnnnnnnnnnnnnnnnnnnnnnnnnnnnnnnnnnnnnnnnnnnnnnnnnnnnnnnnnnnnnnnnnnnnnnnnnnnnnnnnnnnnnnnnnnnnnnnnnnnnnnnnnnnnnnnnnnnnnnnnnnnnnnnnnnnnnnnnnnnnnnnnnnnnnnnnnnnnnnnnnnnnnnnnnnnnnnnnnnnnnnnnnnnnnnnnnnnnnnnnnnnnnnnnnnnnnnnnnnnnnnnnnnnnnnnnnnnnnnnnnnnnnnnnnnnnnnnnnnnnnnnnnnnnnnnnnnnnnnnnnnnnnnnnnnnnnnnnnnnnnnnnnnnnnnnnnnnnnnnnnnnnnnnnnnnnnnnnnnnnnnnnnnnnnnnnnnnnnnnnnnnnnnnnnnnnnnnnnnnnnnnnnnnnnnnnnnnnnnnnnnnnnnnnnnnnnnnnnnnnnnnnnnnnnnnnnnnnnnnnnnnnnnnnnnnnnnnnnnnnnnnnnnnnnnnnnnnnnnnnnnnnnnnnnnnnnnnnnnnnnnnnnnnnnnnnnnnnnnnnnnnnnnnnnnnnnnnnnnnnnnnnnnnnnnnnnnnnnnnnnnnnnnnnnnnnnnnnnnnnnnnnnnnnnnnnnnnnnnnnnnnnnnnnnnnnnnnnnnnnnnnnnnnnnnnnnnnnnnnnnnnnnnnnnnnnnnnnnnnnnnnnnnnnnnnnnnnnnnnnnnnnnnnnnnnnnnnnnnnnnnnnnnnnnnnnnnnnnnnnnnnnnnnnnnnnnnnnnnnnnnnnnnnnnnnnnnnnnnnnnnnnnnnnnnnnnnnnnnnnnnnnnnnnnnnnnnnnnnnnnnnnnnnnnnnnnnnnnnnnnnnnnnnnnnnnnnnnnnnnnnnnnnnnnnnnnnnnnnnnnnnnnnnnnnnnnnnnnnnnnnnnnnnnnnnnnnnnnnnnnnnnnnnnnnnnnnnnnnnnnnnnnnnnnnnnnnnnnnnnnnnnnnnnnnnnnnnnnnnnnnnnnnnnnnnnnnnnnnnnnnnnnnnnnnnnnnnnnnnnnnnnnnnnnnnnnnnnnnnnnnnnnnnnnnnnnnnnnnnnnnnnnnnnnnnnnnnnnnnnnnnnnnnnnnnnnnnnnnnnnnnnnnnnnnnnnnnnnnnnnnnnnnnnnnnnnnnnnnnnnnnnnnnnnnnnnnnnnnnnnnnnnnnnnnnnnnnnnnnnnnnnnnnnnnnnnnnnnnnnnnnnnnnnnnnnnnnnnnnnnnnnnnnnnnnnnnnnnnnnnnnnnnnnnnnnnnnnnnnnnnnnnnnnnnnnnnnnnnnnnnnnnnnnnnnnnnnnnnnnnnnnnnnnnnnnnnnnnnnnnnnnnnnnnnnnnnnnnnnnnnnnnnnnnnnnnnnnnnnnnnnnnnnnnnnnnnnnnnnnnnnnnnnnnnnnnnnnnnnnnnnnnnnnnnnnnnnnnnnnnnnnnnnnnnnnnnnnnnnnnnnnnnnnnnnnnnnnnnnnnnnnnnnnnnnnnnnnnnnnnnnnnnnnnnnnnnnnnnnnnnnnnnnnnnnnnnnnnnnnnnnnnnnnnnnnnnnnnnnnnnnnnnnnnnnnnnnnnnnnnnnnnnnnnnnnnnnnnnnnnnnnnnnnnnnnnnnnnnnnnnnnnnnnnnnnnnnnnnnnnnnnnnnnnnnnnnnnnnnnnnnnnnnnnnnnnnnnnnnnnnnnnnnnnnnnnnnnnnnnnnnnnnnnnnnnnnnnnnnnnnnnnnnnnnnnnnnnnnnnnnnnnnnnnnnnnnnnnnnnnnnnnnnnnnnnnnnnnnnnnnnnnnnnnnnnnnnnnnnnnnnnnnnnnnnnnnnnnnnnnnnnnnnnnnnnnnnnnnnnnnnnnnnnnnnnnnnnnnnnnnnnnnnnnnnnnnnnnnnnnnnnnnnnnnnnnnnnnnnnnnnnnnnnnnnnnnnnnnnnnnnnnnnnnnnnnnnnnnnnnnnnnnnnnnnnnnnnnnnnnnnnnnnnnnnnnnnnnnnnnnnnnnnnnnnnnnnnnnnnnnnnnnnnnnnnnnnnnnnnnnnnnnnnnnnnnnnnnnnnnnnnnnnnnnnnnnnnnnnnnnnnnnnnnnnnnnnnnnnnnnnnnnnnnnnnnnnnnnnnnnnnnnnnnnnnnnnnnnnnnnnnnnnnnnnnnnnnnnnnnnnnnnnnnnnnnnnnnnnnnnnnnnnnnnnnnnnnnnnnnnnnnnnnnnnnnnnnnnnnnnnnnnnnnnnnnnnnnnnnnnnnnnnnnnnnnnnnnnnnnnnnnnnnnnnnnnnnnnnnnnnnnnnnnnnnnnnnnnnnnnnnnnnnnnnnnnnnnnnnnnnnnnnnnnnnnnnnnnnnnnnnnnnnnnnnnnnnnnnnnnnnnnnnnnnnnnnnnnnnnnnnnnnnnnnnnnnnnnnnnnnnnnnnnnnnnnnnnnnnnnnnnnnnnnnnnnnnnnnnnnnnnnnnnnnnnnnnnnnnnnnnnnnnnnnnnnnnnnnnnnnnnnnnnnnnnnnnnnnnnnnnnnnnnnnnnnnnnnnnnnnnnnnnnnnnnnnnnnnnnnnnnnnnnnnnnnnnnnnnnnnnnnnnnnnnnnnnnnnnnnnnnnnnnnnnnnnnnnnnnnnnnnnnnnnnnnnnnnnnnnnnnnnnnnnnnnnnnnnnnnnnnnnnnnnnnnnnnnnnnnnnnnnnnnnnnnnnnnnnnnnnnnnnnnnnnnnnnnnnnnnnnnnnnnnnnnnnnnnnnnnnnnnnnnnnnnnnnnnnnnnnnnnnnnnnnnnnnnnnnnnnnnnnnnnnnnnnnnnnnnnnnnnnnnnnnnnnnnnnnnnnnnnnnnnnnnnnnnnnnnnnnnnnnnnnnnnnnnnnnnnnnnnnnnnnnnnnnnnnnnnnnnnnnnnnnnnnnnnnnnnnnnnnnnnnnnnnnnnnnnnnnnnnnnnnnnnnnnnnnnnnnnnnnnnnnnnnnnnnnnnnnnnnnnnnnnnnnnnnnnnnnnnnnnnnnnnnnnnnnnnnnnnnnnnnnnnnnnnnnnnnnnnnnnnnnnnnnnnnnnnnnnnnnnnnnnnnnnnnnnnnnnnnnnnnnnnnnnnnnnnnnnnnnnnnnnnnnnnnnnnnnnnnnnnnnnnnnnnnnnnnnnnnnnnnnnnnnnnnnnnnnnnnnnnnnnnnnnnnnnnnnnnnnnnnnnnnnnnnnnnnnnnnnnnnnnnnnnnnnnnnnnnnnnnnnnnnnnnnnnnnnnnnnnnnnnnnnnnnnnnnnnnnnnnnnnnnnnnnnnnnnnnnnnnnnnnnnnnnnnnnnnnnnnnnnnnnnnnnnnnnnnnnnnnnnnnnnnnnnnnnnnnnnnnnnnnnnnnnnnnnnnnnnnnnnnnnnnnnnnnnnnnnnnnnnnnnnnnnnnnnnnnnnnnnnnnnnnnnnnnnnnnnnnnnnnnnnnnnnnnnnnnnnnnnnnnnnnnnnnnnnnnnnnnnnnnnnnnnnnnnnnnnnnnnnnnnnnnnnnnnnnnnnnnnnnnnnnnnnnnnnnnnnnnnnnnnnnnnnnnnnnnnnnnnnnnnnnnnnnnnnnnnnnnnnnnnnnnnnnnnnnnnnnnnnnnnnnnnnnnnnnnnnnnnnnnnnnnnnnnnnnnnnnnnnnnnnnnnnnnnnnnnnnnnnnnnnnnnnnnnnnnnnnnnnnnnnnnnnnnnnnnnnnnnnnnnnnnnnnnnnnnnnnnnnnnnnnnnnnnnnnnnnnnnnnnnnnnnnnnnnnnnnnnnnnnnnnnnnnnnnnnnnnnnnnnnnnnnnnnnnnnnnnnnnnnnnnnnnnnnnnnnnnnnnnnnnnnnnnnnnnnnnnnnnnnnnnnnnnnnnnnnnnnnnnnnnnnnnnnnnnnnnnnnnnnnnnnnnnnnnnnnnnnnnnnnnnnnnnnnnnnnnnnnnnnnnnnnnnnnnnnnnnnnnnnnnnnnnnnnnnnnnnnnnnnnnnnnnnnnnnnnnnnnnnnnnnnnnnnnnnnnnnnnnnnnnnnnnnnnnnnnnnnnnnnnnnnnnnnnnnnnnnnnnnnnnnnnnnnnnnnnnnnnnnnnnnnnnnnnnnnnnnnnnnnnnnnnnnnnnnnnnnnnnnnnnnnnnnnnnnnnnnnnnnnnnnnnnnnnnnnnnnnnnnnnnnnnnnnnnnnnnnnnnnnnnnnnnnnnnnnnnnnnnnnnnnnnnnnnnnnnnnnnnnnnnnnnnnnnnnnnnnnnnnnnnnnnnnnnnnnnnnnnnnnnnnnnnnnnnnnnnnnnnnnnnnnnnnnnnnnnnnnnnnnnnnnnnnnnnnnnnnnnnnnnnnnnnnnnnnnnnnnnnnnnnnnnnnnnnnnnnnnnnnnnnnnnnnnnnnnnnnnnnnnnnnnnnnnnnnnnnnnnnnnnnnnnnnnnnnnnnnnnnnnnnnnnnnnnnnnnnnnnnnnnnnnnnnnnnnnnnnnnnnnnnnnnnnnnnnnnnnnnnnnnnnnnnnnnnnnnnnnnnnnnnnnnnnnnnnnnnnnnnnnnnnnnnnnnnnnnnnnnnnnnnnnnnnnnnnnnnnnnnnnnnnnnnnnnnnnnnnnnnnnnnnnnnnnnnnnnnnnnnnnnnnnnnnnnnnnnnnnnnnnnnnnnnnnnnnnnnnnnnnnnnnnnnnnnnnnnnnnnnnnnnnnnnnnnnnnnnnnnnnnnnnnnnnnnnnnnnnnnnnnnnnnnnnnnnnnnnnnnnnnnnnnnnnnnnnnnnnnnnnnnnnnnnnnnnnnnnnnnnnnnnnnnnnnnnnnnnnnnnnnnnnnnnnnnnnnnnnnnnnnnnnnnnnnnnnnnnnnnnnnnnnnnnnnnnnnnnnnnnnnnnnnnnnnnnnnnnnnnnnnnnnnnnnnnnnnnnnnnnnnnnnnnnnnnnnnnnnnnnnnnnnnnnnnnnnnnnnnnnnnnnnnnnnnnnnnnnnnnnnnnnnnnnnnnnnnnnnnnnnnnnnnnnnnnnnnnnnnnnnnnnnnnnnnnnnnnnnnnnnnnnnnnnnnnnnnnnnnnnnnnnnnnnnnnnnnnnnnnnnnnnnnnnnnnnnnnnnnnnnnnnnnnnnnnnnnnnnnnnnnnnnnnnnnnnnnnnnnnnnnnnnnnnnnnnnnnnnnnnnnnnnnnnnnnnnnnnnnnnnnnnnnnnnnnnnnnnnnnnnnnnnnnnnnnnnnnnnnnnnnnnnnnnnnnnnnnnnnnnnnnnnnnnnnnnnnnnnnnnnnnnnnnnnnnnnnnnnnnnnnnnnnnnnnnnnnnnnnnnnnnnnnnnnnnnnnnnnnnnnnnnnnnnnnnnnnnnnnnnnnnnnnnnnnnnnnnnnnnnnnnnnnnnnnnnnnnnnnnnnnnnnnnnnnnnnnnnnnnnnnnnnnnnnnnnnnnnnnnnnnnnnnnnnnnnnnnnnnnnnnnnnnnnnnnnnnnnnnnnnnnnnnnnnnnnnnnnnnnnnnnnnnnnnnnnnnnnnnnnnnnnnnnnnnnnnnnnnnnnnnnnnnnnnnnnnnnnnnnnnnnnnnnnnnnnnnnnnnnnnnnnnnnnnnnnnnnnnnnnnnnnnnnnnnnnnnnnnnnnnnnnnnnnnnnnnnnnnnnnnnnnnnnnnnnnnnnnnnnnnnnnnnnnnnnnnnnnnnnnnnnnnnnnnnnnnnnnnnnnnnnnnnnnnnnnnnnnnnnnnnnnnnnnnnnnnnnnnnnnnnnnnnnnnnnnnnnnnnnnnnnnnnnnnnnnnnnnnnnnnnnnnnnnnnnnnnnnnnnnnnnnnnnnnnnnnnnnnnnnnnnnnnnnnnnnnnnnnnnnnnnnnnnnnnnnnnnnnnnnnnnnnnnnnnnnnnnnnnnnnnnnnnnnnnnnnnnnnnnnnnnnnnnnnnnnnnnnnnnnnnnnnnnnnnnnnnnnnnnnnnnnnnnnnnnnnnnnnnnnnnnnnnnnnnnnnnnnnnnnnnnnnnnnnnnnnnnnnnnnnnnnnnnnnnnnnnnnnnnnnnnnnnnnnnnnnnnnnnnnnnnnnnnnnnnnnnnnnnnnnnnnnnnnnnnnnnnnnnnnnnnnnnnnnnnnnnnnnnnnnnnnnnnnnnnnnnnnnnnnnnnnnnnnnnnnnnnnnnnnnnnnnnnnnnnnnnnnnnnnnnnnnnnnnnnnnnnnnnnnnnnnnnnnnnnnnnnnnnnnnnnnnnnnnnnnnnnnnnnnnnnnnnnnnnnnnnnnnnnnnnnnnnnnnnnnnnnnnnnnnnnnnnnnnnnnnnnnnnnnnnnnnnnnnnnnnnnnnnnnnnnnnnnnnnnnnnnnnnnnnnnnnnnnnnnnnnnnnnnnnnnnnnnnnnnnnnnnnnnnnnnnnnnnnnnnnnnnnnnnnnnnnnnnnnnnnnnnnnnnnnnnnnnnnnnnnnnnnnnnnnnnnnnnnnnnnnnnnnnnnnnnnnnnnnnnnnnnnnnnnnnnnnnnnnnnnnnnnnnnnnnnnnnnnnnnnnnnnnnnnnnnnnnnnnnnnnnnnnnnnnnnnnnnnnnnnnnnnnnnnnnnnnnnnnnnnnnnnnnnnnnnnnnnnnnnnnnnnnnnnnnnnnnnnnnnnnnnnnnnnnnnnnnnnnnnnnnnnnnnnnnnnnnnnnnnnnnnnnnnnnnnnnnnnnnnnnnnnnnnnnnnnnnnnnnnnnnnnnnnnnnnnnnnnnnnnnnnnnnnnnnnnnnnnnnnnnnnnnnnnnnnnnnnnnnnnnnnnnnnnnnnnnnnnnnnnnnnnnnnnnnnnnnnnnnnnnnnnnnnnnnnnnnnnnnnnnnnnnnnnnnnnnnnnnnnnnnnnnnnnnnnnnnnnnnnnnnnnnnnnnnnnnnnnnnnnnnnnnnnnnnnnnnnnnnnnnnnnnnnnnnnnnnnnnnnnnnnnnnnnnnnnnnnnnnnnnnnnnnnnnnnnnnnnnnnnnnnnnnnnnnnnnnnnnnnnnnnnnnnnnnnnnnnnnnnnnnnnnnnnnnnnnnnnnnnnnnnnnnnnnnnnnnnnnnnnnnnnnnnnnnnnnnnnnnnnnnnnnnnnnnnnnnnnnnnnnnnnnnnnnnnnnnnnnnnnnnnnnnnnnnnnnnnnnnnnnnnnnnnnnnnnnnnnnnnnnnnnnnnnnnnnnnnnnnnnnnnnnnnnnnnnnnnnnnnnnnnnnnnnnnnnnnnnnnnnnnnnnnnnnnnnnnnnnnnnnnnnnnnnnnnnnnnnnnnnnnnnnnnnnnnnnnnnnnnnnnnnnnnnnnnnnnnnnnnnnnnnnnnnnnnnnnnnnnnnnnnnnnnnnnnnnnnnnnnnnnnnnnnnnnnnnnnnnnnnnnnnnnnnnnnnnnnnnnnnnnnnnnnnnnnnnnnnnnnnnnnnnnnnnnnnnnnnnnnnnnnnnnnnnnnnnnnnnnnnnnnnnnnnnnnnnnnnnnnnnnnnnnnnnnnnnnnnnnnnnnnnnnnnnnnnnnnnnnnnnnnnnnnnnnnnnnnnnnnnnnnnnnnnnnnnnnnnnnnnnnnnnnnnnnnnnnnnnnnnnnnnnnnnnnnnnnnnnnnnnnnnnnnnnnnnnnnnnnnnnnnnnnnnnnnnnnnnnnnnnnnnnnnnnnnnnnnnnnnnnnnnnnnnnnnnnnnnnnnnnnnnnnnnnnnnnnnnnnnnnnnnnnnnnnnnnnnnnnnnnnnnnnnnnnnnnnnnnnnnnnnnnnnnnnnnnnnnnnnnnnnnnnnnnnnnnnnnnnnnnnnnnnnnnnnnnnnnnnnnnnnnnnnnnnnnnnnnnnnnnnnnnnnnnnnnnnnnnnnnnnnnnnnnnnnnnnnnnnnnnnnnnnnnnnnnnnnnnnnnnnnnnnnnnnnnnnnnnnnnnnnnnnnnnnnnnnnnnnnnnnnnnnnnnnnnnnnnnnnnnnnnnnnnnnnnnnnnnnnnnnnnnnnnnnnnnnnnnnnnnnnnnnnnnnnnnnnnnnnnnnnnnnnnnnnnnnnnnnnnnnnnnnnnnnnnnnnnnnnnnnnnnnnnnnnnnnnnnnnnnnnnnnnnnnnnnnnnnnnnnnnnnnnnnnnnnnnnnnnnnnnnnnnnnnnnnnnnnnnnnnnnnnnnnnnnnnnnnnnnnnnnnnnnnnnnnnnnnnnnnnnnnnnnnnnnnnnnnnnnnnnnnnnnnnnnnnnnnnnnnnnnnnnnnnnnnnnnnnnnnnnnnnnnnnnnnnnnnnnnnnnnnnnnnnnnnnnnnnnnnnnnnnnnnnnnnnnnnnnnnnnnnnnnnnnnnnnnnnnnnnnnnnnnnnnnnnnnnnnnnnnnnnnnnnnnnnnnnnnnnnnnnnnnnnnnnnnnnnnnnnnnnnnnnnnnnnnnnnnnnnnnnnnnnnnnnnnnnnnnnnnnnnnnnnnnnnnnnnnnnnnnnnnnnnnnnnnnnnnnnnnnnnnnnnnnnnnnnnnnnnnnnnnnnnnnnnnnnnnnnnnnnnnnnnnnnnnnnnnnnnnnnnnnnnnnnnnnnnnnnnnnnnnnnnnnnnnnnnnnnnnnnnnnnnnnnnnnnnnnnnnnnnnnnnnnnnnnnnnnnnnnnnnnnnnnnnnnnnnnnnnnnnnnnnnnnnnnnnnnnnnnnnnnnnnnnnnnnnnnnnnnnnnnnnnnnnnnnnnnnnnnnnnnnnnnnnnnnnnnnnnnnnnnnnnnnnnnnnnnnnnnnnnnnnnnnnnnnnnnnnnnnnnnnnnnnnnnnnnnnnnnnnnnnnnnnnnnnnnnnnnnnnnnnnnnnnnnnnnnnnnnnnnnnnnnnnnnnnnnnnnnnnnnnnnnnnnnnnnnnnnnnnnnnnnnnnnnnnnnnnnnnnnnnnnnnnnnnnnnnnnnnnnnnnnnnnnnnnnnnnnnnnnnnnnnnnnnnnnnnnnnnnnnnnnnnnnnnnnnnnnnnnnnnnnnnnnnnnnnnnnnnnnnnnnnnnnnnnnnnnnnnnnnnnnnnnnnnnnnnnnnnnnnnnnnnnnnnnnnnnnnnnnnnnnnnnnnnnnnnnnnnnnnnnnnnnnnnnnnnnnnnnnnnnnnnnnnnnnnnnnnnnnnnnnnnnnnnnnnnnnnnnnnnnnnnnnnnnnnnnnnnnnnnnnnnnnnnnnnnnnnnnnnnnnnnnnnnnnnnnnnnnnnnnnnnnnnnnnnnnnnnnnnnnnnnnnnnnnnnnnnnnnnnnnnnnnnnnnnnnnnnnnnnnnnnnnnnnnnnnnnnnnnnnnnnnnnnnnnnnnnnnnnnnnnnnnnnnnnnnnnnnnnnnnnnnnnnnnnnnnnnnnnnnnnnnnnnnnnnnnnnnnnnnnnnnnnnnnnnnnnnnnnnnnnnnnnnnnnnnnnnnnnnnnnnnnnnnnnnnnnnnnnnnnnnnnnnnnnnnnnnnnnnnnnnnnnnnnnnnnnnnnnnnnnnnnnnnnnnnnnnnnnnnnnnnnnnnnnnnnnnnnnnnnnnnnnnnnnnnnnnnnnnnnnnnnnnnnnnnnnnnnnnnnnnnnnnnnnnnnnnnnnnnnnnnnnnnnnnnnnnnnnnnnnnnnnnnnnnnnnnnnnnnnnnnnnnnnnnnnnnnnnnnnnnnnnnnnnnnnnnnnnnnnnnnnnnnnnnnnnnnnnnnnnnnnnnnnnnnnnnnnnnnnnnnnnnnnnnnnnnnnnnnnnnnnnnnnnnnnnnnnnnnnnnnnnnnnnnnnnnnnnnnnnnnnnnnnnnnnnnnnnnnnnnnnnnnnnnnnnnnnnnnnnnnnnnnnnnnnnnnnnnnnnnnnnnnnnnnnnnnnnnnnnnnnnnnnnnnnnnnnnnnnnnnnnnnnnnnnnnnnnnnnnnnnnnnnnnnnnnnnnnnnnnnnnnnnnnnnnnnnnnnnnnnnnnnnnnnnnnnnnnnnnnnnnnnnnnnnnnnnnnnnnnnnnnnnnnnnnnnnnnnnnnnnnnnnnnnnnnnnnnnnnnnnnnnnnnnnnnnnnnnnnnnnnnnnnnnnnnnnnnnnnnnnnnnnnnnnnnnnnnnnnnnnnnnnnnnnnnnnnnnnnnnnnnnnnnnnnnnnnnnnnnnnnnnnnnnnnnnnnnnnnnnnnnnnnnnnnnnnnnnnnnnnnnnnnnnnnnnnnnnnnnnnnnnnnnnnnnnnnnnnnnnnnnnnnnnnnnnnnnnnnnnnnnnnnnnnnnnnnnnnnnnnnnnnnnnnnnnnnnnnnnnnnnnnnnnnnnnnnnnnnnnnnnnnnnnnnnnnnnnnnnnnnnnnnnnnnnnnnnnnnnnnnnnnnnnnnnnnnnnnnnnnnnnnnnnnnnnnnnnnnnnnnnnnnnnnnnnnnnnnnnnnnnnnnnnnnnnnnnnnnnnnnnnnnnnnnnnnnnnnnnnnnnnnnnnnnnnnnnnnnnnnnnnnnnnnnnnnnnnnnnnnnnnnnnnnnnnnnnnnnnnnnnnnnnnnnnnnnnnnnnnnnnnnnnnnnnnnnnnnnnnnnnnnnnnnnnnnnnnnnnnnnnnnnnnnnnnnnnnnnnnnnnnnnnnnnnnnnnnnnnnnnnnnnnnnnnnnnnnnnnnnnnnnnnnnnnnnnnnnnnnnnnnnnnnnnnnnnnnnnnnnnnnnnnnnnnnnnnnnnnnnnnnnnnnnnnnnnnnnnnnnnnnnnnnnnnnnnnnnnnnnnnnnnnnnnnnnnnnnnnnnnnnnnnnnnnnnnnnnnnnnnnnnnnnnnnnnnnnnnnnnnnnnnnnnnnnnnnnnnnnnnnnnnnnnnnnnnnnnnnnnnnnnnnnnnnnnnnnnnnnnnnnnnnnnnnnnnnnnnnnnnnnnnnnnnnnnnnnnnnnnnnnnnnnnnnnnnnnnnnnnnnnnnnnnnnnnnnnnnnnnnnnnnnnnnnnnnnnnnnnnnnnnnnnnnnnnnnnnnnnnnnnnnnnnnnnnnnnnnnnnnnnnnnnnnnnnnnnnnnnnnnnnnnnnnnnnnnnnnnnnnnnnnnnnnnnnnnnnnnnnnnnnnnnnnnnnnnnnnnnnnnnnnnnnnnnnnnnnnnnnnnnnnnnnnnnnnnnnnnnnnnnnnnnnnnnnnnnnnnnnnnnnnnnnnnnnnnnnnnnnnnnnnnnnnnnnnnnnnnnnnnnnnnnnnnnnnnnnnnnnnnnnnnnnnnnnnnnnnnnnnnnnnnnnnnnnnnnnnnnnnnnnnnnnnnnnnnnnnnnnnnnnnnnnnnnnnnnnnnnnnnnnnnnnnnnnnnnnnnnnnnnnnnnnnnnnnnnnnnnnnnnnnnnnnnnnnnnnnnnnnnnnnnnnnnnnnnnnnnnnnnnnnnnnnnnnnnnnnnnnnnnnnnnnnnnnnnnnnnnnnnnnnnnnnnnnnnnnnnnnnnnnnnnnnnnnnnnnnnnnnnnnnnnnnnnnnnnnnnnnnnnnnnnnnnnnnnnnnnnnnnnnnnnnnnnnnnnnnnnnnnnnnnnnnnnnnnnnnnnnnnnnnnnnnnnnnnnnnnnnnnnnnnnnnnnnnnnnnnnnnnnnnnnnnnnnnnnnnnnnnnnnnnnnnnnnnnnnnnnnnnnnnnnnnnnnnnnnnnnnnnnnnnnnnnnnnnnnnnnnnnnnnnnnnnnnnnnnnnnnnnnnnnnnnnnnnnnnnnnnnnnnnnnnnnnnnnnnnnnnnnnnnnnnnnnnnnnnnnnnnnnnnnnnnnnnnnnnnnnnnnnnnnnnnnnnnnnnnnnnnnnnnnnnnnnnnnnnnnnnnnnnnnnnnnnnnnnnnnnnnnnnnnnnnnnnnnnnnnnnnnnnnnnnnnnnnnnnnnnnnnnnnnnnnnnnnnnnnnnnnnnnnnnnnnnnnnnnnnnnnnnnnnnnnnnnnnnnnnnnnnnnnnnnnnnnnnnnnnnnnnnnnnnnnnnnnnnnnnnnnnnnnnnnnnnnnnnnnnnnnnnnnnnnnnnnnnnnnnnnnnnnnnnnnnnnnnnnnnnnnnnnnnnnnnnnnnnnnnnnnnnnnnnnnnnnnnnnnnnnnnnnnnnnnnnnnnnnnnnnnnnnnnnnnnnnnnnnnnnnnnnnnnnnnnnnnnnnnnnnnnnnnnnnnnnnnnnnnnnnnnnnnnnnnnnnnnnnnnnnnnnnnnnnnnnnnnnnnnnnnnnnnnnnnnnnnnnnnnnnnnnnnnnnnnnnnnnnnnnnnnnnnnnnnnnnnnnnnnnnnnnnnnnnnnnnnnnnnnnnnnnnnnnnnnnnnnnnnnnnnnnnnnnnnnnnnnnnnnnnnnnnnnnnnnnnnnnnnnnnnnnnnnnnnnnnnnnnnnnnnnnnnnnnnnnnnnnnnnnnnnnnnnnnnnnnnnnnnnnnnnnnnnnnnnnnnnnnnnnnnnnnnnnnnnnnnnnnnnnnnnnnnnnnnnnnnnnnnnnnnnnnnnnnnnnnnnnnnnnnnnnnnnnnnnnnnnnnnnnnnnnnnnnnnnnnnnnnnnnnnnnnnnnnnnnnnnnnnnnnnnnnnnnnnnnnnnnnnnnnnnnnnnnnnnnnnnnnnnnnnnnnnnnnnnnnnnnnnnnnnnnnnnnnnnnnnnnnnnnnnnnnnnnnnnnnnnnnnnnnnnnnnnnnnnnnnnnnnnnnnnnnnnnnnnnnnnnnnnnnnnnnnnnnnnnnnnnnnnnnnnnnnnnnnnnnnnnnnnnnnnnnnnnnnnnnnnnnnnnnnnnnnnnnnnnnnnnnnnnnnnnnnnnnnnnnnnnnnnnnnnnnnnnnnnnnnnnnnnnnnnnnnnnnnnnnnnnnnnnnnnnnnnnnnnnnnnnnnnnnnnnnnnnnnnnnnnnnnnnnnnnnnnnnnnnnnnnnnnnnnnnnnnnnnnnnnnnnnnnnnnnnnnnnnnnnnnnnnnnnnnnnnnnnnnnnnnnnnnnnnnnnnnnnnnnnnnnnnnnnnnnnnnnnnnnnnnnnnnnnnnnnnnnnnnnnnnnnnnnnnnnnnnnnnnnnnnnnnnnnnnnnnnnnnnnnnnnnnnnnnnnnnnnnnnnnnnnnnnnnnnnnnnnnnnnnnnnnnnnnnnnnnnnnnnnnnnnnnnnnnnnnnnnnnnnnnnnnnnnnnnnnnnnnnnnnnnnnnnnnnnnnnnnnnnnnnnnnnnnnnnnnnnnnnnnnnnnnnnnnnnnnnnnnnnnnnnnnnnnnnnnnnnnnnnnnnnnnnnnnnnnnnnnnnnnnnnnnnnnnnnnnnnnnnnnnnnnnnnnnnnnnnnnnnnnnnnnnnnnnnnnnnnnnnnnnnnnnnnnnnnnnnnnnnnnnnnnnnnnnnnnnnnnnnnnnnnnnnnnnnnnnnnnnnnnnnnnnnnnnnnnnnnnnnnnnnnnnnnnnnnnnnnnnnnnnnnnnnnnnnnnnnnnnnnnnnnnnnnnnnnnnnnnnnnnnnnnnnnnnnnnnnnnnnnnnnnnnnnnnnnnnnnnnnnnnnnnnnnnnnnnnnnnnnnnnnnnnnnnnnnnnnnnnnnnnnnnnnnnnnnnnnnnnnnnnnnnnnnnnnnnnnnnnnnnnnnnnnnnnnnnnnnnnnnnnnnnnnnnnnnnnnnnnnnnnnnnnnnnnnnnnnnnnnnnnnnnnnnnnnnnnnnnnnnnnnnnnnnnnnnnnnnnnnnnnnnnnnnnnnnnnnnnnnnnnnnnnnnnnnnnnnnnnnnnnnnnnnnnnnnnnnnnnnnnnnnnnnnnnnnnnnnnnnnnnnnnnnnnnnnnnnnnnnnnnnnnnnnnnnnnnnnnnnnnnnnnnnnnnnnnnnnnnnnnnnnnnnnnnnnnnnnnnnnnnnnnnnnnnnnnnnnnnnnnnnnnnnnnnnnnnnnnnnnnnnnnnnnnnnnnnnnnnnnnnnnnnnnnnnnnnnnnnnnnnnnnnnnnnnnnnnnnnnnnnnnnnnnnnnnnnnnnnnnnnnnnnnnnnnnnnnnnnnnnnnnnnnnnnnnnnnnnnnnnnnnnnnnnnnnnnnnnnnnnnnnnnnnnnnnnnnnnnnnnnnnnnnnnnnnnnnnnnnnnnnnnnnnnnnnnnnnnnnnnnnnnnnnnnnnnnnnnnnnnnnnnnnnnnnnnnnnnnnnnnnnnnnnnnnnnnnnnnnnnnnnnnnnnnnnnnnnnnnnnnnnnnnnnnnnnnnnnnnnnnnnnnnnnnnnnnnnnnnnnnnnnnnnnnnnnnnnnnnnnnnnnnnnnnnnnnnnnnnnnnnnnnnnnnnnnnnnnnnnnnnnnnnnnnnnnnnnnnnnnnnnnnnnnnnnnnnnnnnnnnnnnnnnnnnnnnnnnnnnnnnnnnnnnnnnnnnnnnnnnnnnnnnnnnnnnnnnnnnnnnnnnnnnnnnnnnnnnnnnnnnnnnnnnnnnnnnnnnnnnnnnnnnnnnnnnnnnnnnnnnnnnnnnnnnnnnnnnnnnnnnnnnnnnnnnnnnnnnnnnnnnnnnnnnnnnnnnnnnnnnnnnnnnnnnnnnnnnnnnnnnnnnnnnnnnnnnnnnnnnnnnnnnnnnnnnnnnnnnnnnnnnnnnnnnnnnnnnnnnnnnnnnnnnnnnnnnnnnnnnnnnnnnnnnnnnnnnnnnnnnnnnnnnnnnnnnnnnnnnnnnnnnnnnnnnnnnnnnnnnnnnnnnnnnnnnnnnnnnnnnnnnnnnnnnnnnnnnnnnnnnnnnnnnnnnnnnnnnnnnnnnnnnnnnnnnnnnnnnnnnnnnnnnnnnnnnnnnnnnnnnnnnnnnnnnnnnnnnnnnnnnnnnnnnnnnnnnnnnnnnnnnnnnnnnnnnnnnnnnnnnnnnnnnnnnnnnnnnnnnnnnnnnnnnnnnnnnnnnnnnnnnnnnnnnnnnnnnnnnnnnnnnnnnnnnnnnnnnnnnnnnnnnnnnnnnnnnnnnnnnnnnnnnnnnnnnnnnnnnnnnnnnnnnnnnnnnnnnnnnnnnnnnnnnnnnnnnnnnnnnnnnnnnnnnnnnnnnnnnnnnnnnnnnnnnnnnnnnnnnnnnnnnnnnnnnnnnnnnnnnnnnnnnnnnnnnnnnnnnnnnnnnnnnnnnnnnnnnnnnnnnnnnnnnnnnnnnnnnnnnnnnnnnnnnnnnnnnnnnnnnnnnnnnnnnnnnnnnnnnnnnnnnnnnnnnnnnnnnnnnnnnnnnnnnnnnnnnnnnnnnnnnnnnnnnnnnnnnnnnnnnnnnnnnnnnnnnnnnnnnnnnnnnnnnnnnnnnnnnnnnnnnnnnnnnnnnnnnnnnnnnnnnnnnnnnnnnnnnnnnnnnnnnnnnnnnnnnnnnnnnnnnnnnnnnnnnnnnnnnnnnnnnnnnnnnnnnnnnnnnnnnnnnnnnnnnnnnnnnnnnnnnnnnnnnnnnnnnnnnnnnnnnnnnnnnnnnnnnnnnnnnnnnnnnnnnnnnnnnnnnnnnnnnnnnnnnnnnnnnnnnnnnnnnnnnnnnnnnnnnnnnnnnnnnnnnnnnnnnnnnnnnnnnnnnnnnnnnnnnnnnnnnnnnnnnnnnnnnnnnnnnnnnnnnnnnnnnnnnnnnnnnnnnnnnnnnnnnnnnnnnnnnnnnnnnnnnnnnnnnnnnnnnnnnnnnnnnnnnnnnnnnnnnnnnnnnnnnnnnnnnnnnnnnnnnnnnnnnnnnnnnnnnnnnnnnnnnnnnnnnnnnnnnnnnnnnnnnnnnnnnnnnnnnnnnnnnnnnnnnnnnnnnnnnnnnnnnnnnnnnnnnnnnnnnnnnnnnnnnnnnnnnnnnnnnnnnnnnnnnnnnnnnnnnnnnnnnnnnnnnnnnnnnnnnnnnnnnnnnnnnnnnnnnnnnnnnnnnnnnnnnnnnnnnnnnnnnnnnnnnnnnnnnnnnnnnnnnnnnnnnnnnnnnnnnnnnnnnnnnnnnnnnnnnnnnnnnnnnnnnnnnnnnnnnnnnnnnnnnnnnnnnnnnnnnnnnnnnnnnnnnnnnnnnnnnnnnnnnnnnnnnnnnnnnnnnnnnnnnnnnnnnnnnnnnnnnnnnnnnnnnnnnnnnnnnnnnnnnnnnnnnnnnnnnnnnnnnnnnnnnnnnnnnnnnnnnnnnnnnnnnnnnnnnnnnnnnnnnnnnnnnnnnnnnnnnnnnnnnnnnnnnnnnnnnnnnnnnnnnnnnnnnnnnnnnnnnnnnnnnnnnnnnnnnnnnnnnnnnnnnnnnnnnnnnnnnnnnnnnnnnnnnnnnnnnnnnnnnnnnnnnnnnnnnnnnnnnnnnnnnnnnnnnnnnnnnnnnnnnnnnnnnnnnnnnnnnnnnnnnnnnnnnnnnnnnnnnnnnnnnnnnnnnnnnnnnnnnnnnnnnnnnnnnnnnnnnnnnnnnnnnnnnnnnnnnnnnnnnnnnnnnnnnnnnnnnnnnnnnnnnnnnnnnnnnnnnnnnnnnnnnnnnnnnnnnnnnnnnnnnnnnnnnnnnnnnnnnnnnnnnnnnnnnnnnnnnnnnnnnnnnnnnnnnnnnnnnnnnnnnnnnnnnnnnnnnnnnnnnnnnnnnnnnnnnnnnnnnnnnnnnnnnnnnnnnnnnnnnnnnnnnnnnnnnnnnnnnnnnnnnnnnnnnnnnnnnnnnnnnnnnnnnnnnnnnnnnnnnnnnnnnnnnnnnnnnnnnnnnnnnnnnnnnnnnnnnnnnnnnnnnnnnnnnnnnnnnnnnnnnnnnnnnnnnnnnnnnnnnnnnnnnnnnnnnnnnnnnnnnnnnnnnnnnnnnnnnnnnnnnnnnnnnnnnnnnnnnnnnnnnnnnnnnnnnnnnnnnnnnnnnnnnnnnnnnnnnnnnnnnnnnnnnnnnnnnnnnnnnnnnnnnnnnnnnnnnnnnnnnnnnnnnnnnnnnnnnnnnnnnnnnnnnnnnnnnnnnnnnnnnnnnnnnnnnnnnnnnnnnnnnnnnnnnnnnnnnnnnnnnnnnnnnnnnnnnnnnnnnnnnnnnnnnnnnnnnnnnnnnnnnnnnnnnnnnnnnnnnnnnnnnnnnnnnnnnnnnnnnnnnnnnnnnnnnnnnnnnnnnnnnnnnnnnnnnnnnnnnnnnnnnnnnnnnnnnnnnnnnnnnnnnnnnnnnnnnnnnnnnnnnnnnnnnnnnnnnnnnnnnnnnnnnnnnnnnnnnnnnnnnnnnnnnnnnnnnnnnnnnnnnnnnnnnnnnnnnnnnnnnnnnnnnnnnnnnnnnnnnnnnnnnnnnnnnnnnnnnnnnnnnnnnnnnnnnnnnnnnnnnnnnnnnnnnnnnnnnnnnnnnnnnnnnnnnnnnnnnnnnnnnnnnnnnnnnnnnnnnnnnnnnnnnnnnnnnnnnnnnnnnnnnnnnnnnnnnnnnnnnnnnnnnnnnnnnnnnnnnnnnnnnnnnnnnnnnnnnnnnnnnnnnnnnnnnnnnnnnnnnnnnnnnnnnnnnnnnnnnnnnnnnnnnnnnnnnnnnnnnnnnnnnnnnnnnnnnnnnnnnnnnnnnnnnnnnnnnnnnnnnnnnnnnnnnnnnnnnnnnnnnnnnnnnnnnnnnnnnnnnnnnnnnnnnnnnnnnnnnnnnnnnnnnnnnnnnnnnnnnnnnnnnnnnnnnnnnnnnnnnnnnnnnnnnnnnnnnnnnnnnnnnnnnnnnnnnnnnnnnnnnnnnnnnnnnnnnnnnnnnnnnnnnnnnnnnnnnnnnnnnnnnnnnnnnnnnnnnnnnnnnnnnnnnnnnnnnnnnnnnnnnnnnnnnnnnnnnnnnnnnnnnnnnnnnnnnnnnnnnnnnnnnnnnnnnnnnnnnnnnnnnnnnnnnnnnnnnnnnnnnnnnnnnnnnnnnnnnnnnnnnnnnnnnnnnnnnnnnnnnnnnnnnnnnnnnnnnnnnnnnnnnnnnnnnnnnnnnnnnnnnnnnnnnnnnnnnnnnnnnnnnnnnnnnnnnnnnnnnnnnnnnnnnnnnnnnnnnnnnnnnnnnnnnnnnnnnnnnnnnnnnnnnnnnnnnnnnnnnnnnnnnnnnnnnnnnnnnnnnnnnnnnnnnnnnnnnnnnnnnnnnnnnnnnnnnnnnnnnnnnnnnnnnnnnnnnnnnnnnnnnnnnnnnnnnnnnnnnnnnnnnnnnnnnnnnnnnnnnnnnnnnnnnnnnnnnnnnnnnnnnnnnnnnnnnnnnnnnnnnnnnnnnnnnnnnnnnnnnnnnnnnnnnnnnnnnnnnnnnnnnnnnnnnnnnnnnnnnnnnnnnnnnnnnnnnnnnnnnnnnnnnnnnnnnnnnnnnnnnnnnnnnnnnnnnnnnnnnnnnnnnnnnnnnnnnnnnnnnnnnnnnnnnnnnnnnnnnnnnnnnnnnnnnnnnnnnnnnnnnnnnnnnnnnnnnnnnnnnnnnnnnnnnnnnnnnnnnnnnnnnnnnnnnnnnnnnnnnnnnnnnnnnnnnnnnnnnnnnnnnnnnnnnnnnnnnnnnnnnnnnnnnnnnnnnnnnnnnnnnnnnnnnnnnnnnnnnnnnnnnnnnnnnnnnnnnnnnnnnnnnnnnnnnnnnnnnnnnnnnnnnnnnnnnnnnnnnnnnnnnnnnnnnnnnnnnnnnnnnnnnnnnnnnnnnnnnnnnnnnnnnnnnnnnnnnnnnnnnnnnnnnnnnnnnnnnnnnnnnnnnnnnnnnnnnnnnnnnnnnnnnnnnnnnnnnnnnnnnnnnnnnnnnnnnnnnnnnnnnnnnnnnnnnnnnnnnnnnnnnnnnnnnnnnnnnnnnnnnnnnnnnnnnnnnnnnnnnnnnnnnnnnnnnnnnnnnnnnnnnnnnnnnnnnnnnnnnnnnnnnnnnnnnnnnnnnnnnnnnnnnnnnnnnnnnnnnnnnnnnnnnnnnnnnnnnnnnnnnnnnnnnnnnnnnnnnnnnnnnnnnnnnnnnnnnnnnnnnnnnnnnnnnnnnnnnnnnnnnnnnnnnnnnnnnnnnnnnnnnnnnnnnnnnnnnnnnnnnnnnnnnnnnnnnnnnnnnnnnnnnnnnnnnnnnnnnnnnnnnnnnnnnnnnnnnnnnnnnnnnnnnnnnnnnnnnnnnnnnnnnnnnnnnnnnnnnnnnnnnnnnnnnnnnnnnnnnnnnnnnnnnnnnnnnnnnnnnnnnnnnnnnnnnnnnnnnnnnnnnnnnnnnnnnnnnnnnnnnnnnnnnnnnnnnnnnnnnnnnnnnnnnnnnnnnnnnnnnnnnnnnnnnnnnnnnnnnnnnnnnnnnnnnnnnnnnnnnnnnnnnnnnnnnnnnnnnnnnnnnnnnnnnnnnnnnnnnnnnnnnnnnnnnnnnnnnnnnnnnnnnnnnnnnnnnnnnnnnnnnnnnnnnnnnnnnnnnnnnnnnnnnnnnnnnnnnnnnnnnnnnnnnnnnnnnnnnnnnnnnnnnnnnnnnnnnnnnnnnnnnnnnnnnnnnnnnnnnnnnnnnnnnnnnnnnnnnnnnnnnnnnnnnnnnnnnnnnnnnnnnnnnnnnnnnnnnnnnnnnnnnnnnnnnnnnnnnnnnnnnnnnnnnnnnnnnnnnnnnnnnnnnnnnnnnnnnnnnnnnnnnnnnnnnnnnnnnnnnnnnnnnnnnnnnnnnnnnnnnnnnnnnnnnnnnnnnnnnnnnnnnnnnnnnnnnnnnnnnnnnnnnnnnnnnnnnnnnnnnnnnnnnnnnnnnnnnnnnnnnnnnnnnnnnnnnnnnnnnnnnnnnnnnnnnnnnnnnnnnnnnnnnnnnnnnnnnnnnnnnnnnnnnnnnnnnnnnnnnnnnnnnnnnnnnnnnnnnnnnnnnnnnnnnnnnnnnnnnnnnnnnnnnnnnnnnnnnnnnnnnnnnnnnnnnnnnnnnnnnnnnnnnnnnnnnnnnnnnnnnnnnnnnnnnnnnnnnnnnnnnnnnnnnnnnnnnnnnnnnnnnnnnnnnnnnnnnnnnnnnnnnnnnnnnnnnnnnnnnnnnnnnnnnnnnnnnnnnnnnnnnnnnnnnnnnnnnnnnnnnnnnnnnnnnnnnnnnnnnnnnnnnnnnnnnnnnnnnnnnnnnnnnnnnnnnnnnnnnnnnnnnnnnnnnnnnnnnnnnnnnnnnnnnnnnnnnnnnnnnnnnnnnnnnnnnnnnnnnnnnnnnnnnnnnnnnnnnnnnnnnnnnnnnnnnnnnnnnnnnnnnnnnnnnnnnnnnnnnnnnnnnnnnnnnnnnnnnnnnnnnnnnnnnnnnnnnnnnnnnnnnnnnnnnnnnnnnnnnnnnnnnnnnnnnnnnnnnnnnnnnnnnnnnnnnnnnnnnnnnnnnnnnnnnnnnnnnnnnnnnnnnnnnnnnnnnnnnnnnnnnnnnnnnnnnnnnnnnnnnnnnnnnnnnnnnnnnnnnnnnnnnnnnnnnnnnnnnnnnnnnnnnnnnnnnnnnnnnnnnnnnnnnnnnnnnnnnnnnnnnnnnnnnnnnnnnnnnnnnnnnnnnnnnnnnnnnnnnnnnnnnnnnnnnnnnnnnnnnnnnnnnnnnnnnnnnnnnnnnnnnnnnnnnnnnnnnnnnnnnnnnnnnnnnnnnnnnnnnnnnnnnnnnnnnnnnnnnnnnnnnnnnnnnnnnnnnnnnnnnnnnnnnnnnnnnnnnnnnnnnnnnnnnnnnnnnnnnnnnnnnnnnnnnnnnnnnnnnnnnnnnnnnnnnnnnnnnnnnnnnnnnnnnnnnnnnnnnnnnnnnnnnnnnnnnnnnnnnnnnnnnnnnnnnnnnnnnnnnnnnnnnnnnnnnnnnnnnnnnnnnnnnnnnnnnnnnnnnnnnnnnnnnnnnnnnnnnnnnnnnnnnnnnnnnnnnnnnnnnnnnnnnnnnnnnnnnnnnnnnnnnnnnnnnnnnnnnnnnnnnnnnnnnnnnnnnnnnnnnnnnnnnnnnnnnnnnnnnnnnnnnnnnnnnnnnnnnnnnnnnnnnnnnnnnnnnnnnnnnnnnnnnnnnnnnnnnnnnnnnnnnnnnnnnnnnnnnnnnnnnnnnnnnnnnnnnnnnnnnnnnnnnnnnnnnnnnnnnnnnnnnnnnnnnnnnnnnnnnnnnnnnnnnnnnnnnnnnnnnnnnnnnnnnnnnnnnnnnnnnnnnnnnnnnnnnnnnnnnnnnnnnnnnnnnnnnnnnnnnnnnnnnnnnnnnnnnnnnnnnnnnnnnnnnnnnnnnnnnnnnnnnnnnnnnnnnnnnnnnnnnnnnnnnnnnnnnnnnnnnnnnnnnnnnnnnnnnnnnnnnnnnnnnnnnnnnnnnnnnnnnnnnnnnnnnnnnnnnnnnnnnnnnnnnnnnnnnnnnnnnnnnnnnnnnnnnnnnnnnnnnnnnnnnnnnnnnnnnnnnnnnnnnnnnnnnnnnnnnnnnnnnnnnnnnnnnnnnnnnnnnnnnnnnnnnnnnnnnnnnnnnnnnnnnnnnnnnnnnnnnnnnnnnnnnnnnnnnnnnnnnnnnnnnnnnnnnnnnnnnnnnnnnnnnnnnnnnnnnnnnnnnnnnnnnnnnnnnnnnnnnnnnnnnnnnnnnnnnnnnnnnnnnnnnnnnnnnnnnnnnnnnnnnnnnnnnnnnnnnnnnnnnnnnnnnnnnnnnnnnnnnnnnnnnnnnnnnnnnnnnnnnnnnnnnnnnnnnnnnnnnnnnnnnnnnnnnnnnnnnnnnnnnnnnnnnnnnnnnnnnnnnnnnnnnnnnnnnnnnnnnnnnnnnnnnnnnnnnnnnnnnnnnnnnnnnnnnnnnnnnnnnnnnnnnnnnnnnnnnnnnnnnnnnnnnnnnnnnnnnnnnnnnnnnnnnnnnnnnnnnnnnnnnnnnnnnnnnnnnnnnnnnnnnnnnnnnnnnnnnnnnnnnnnnnnnnnnnnnnnnnnnnnnnnnnnnnnnnnnnnnnnnnnnnnnnnnnnnnnnnnnnnnnnnnnnnnnnnnnnnnnnnnnnnnnnnnnnnnnnnnnnnnnnnnnnnnnnnnnnnnnnnnnnnnnnnnnnnnnnnnnnnnnnnnnnnnnnnnnnnnnnnnnnnnnnnnnnnnnnnnnnnnnnnnnnnnnnnnnnnnnnnnnnnnnnnnnnnnnnnnnnnnnnnnnnnnnnnnnnnnnnnnnnnnnnnnnnnnnnnnnnnnnnnnnnnnnnnnnnnnnnnnnnnnnnnnnnnnnnnnnnnnnnnnnnnnnnnnnnnnnnnnnnnnnnnnnnnnnnnnnnnnnnnnnnnnnnnnnnnnnnnnnnnnnnnnnnnnnnnnnnnnnnnnnnnnnnnnnnnnnnnnnnnnnnnnnnnnnnnnnnnnnnnnnnnnnnnnnnnnnnnnnnnnnnnnnnnnnnnnnnnnnnnnnnnnnnnnnnnnnnnnnnnnnnnnnnnnnnnnnnnnnnnnnnnnnnnnnnnnnnnnnnnnnnnnnnnnnnnnnnnnnnnnnnnnnnnnnnnnnnnnnnnnnnnnnnnnnnnnnnnnnnnnnnnnnnnnnnnnnnnnnnnnnnnnnnnnnnnnnnnnnnnnnnnnnnnnnnnnnnnnnnnnnnnnnnnnnnnnnnnnnnnnnnnnnnnnnnnnnnnnnnnnnnnnnnnnnnnnnnnnnnnnnnnnnnnnnnnnnnnnnnnnnnnnnnnnnnnnnnnnnnnnnnnnnnnnnnnnnnnnnnnnnnnnnnnnnnnnnnnnnnnnnnnnnnnnnnnnnnnnnnnnnnnnnnnnnnnnnnnnnnnnnnnnnnnnnnnnnnnnnnnnnnnnnnnnnnnnnnnnnnnnnnnnnnnnnnnnnnnnnnnnnnnnnnnnnnnnnnnnnnnnnnnnnnnnnnnnnnnnnnnnnnnnnnnnnnnnnnnnnnnnnnnnnnnnnnnnnnnnnnnnnnnnnnnnnnnnnnnnnnnnnnnnnnnnnnnnnnnnnnnnnnnnnnnnnnnnnnnnnnnnnnnnnnnnnnnnnnnnnnnnnnnnnnnnnnnnnnnnnnnnnnnnnnnnnnnnnnnnnnnnnnnnnnnnnnnnnnnnnnnnnnnnnnnnnnnnnnnnnnnnnnnnnnnnnnnnnnnnnnnnnnnnnnnnnnnnnnnnnnnnnnnnnnnnnnnnnnnnnnnnnnnnnnnnnnnnnnnnnnnnnnnnnnnnnnnnnnnnnnnnnnnnnnnnnnnnnnnnnnnnnnnnnnnnnnnnnnnnnnnnnnnnnnnnnnnnnnnnnnnnnnnnnnnnnnnnnnnnnnnnnnnnnnnnnnnnnnnnnnnnnnnnnnnnnnnnnnnnnnnnnnnnnnnnnnnnnnnnnnnnnnnnnnnnnnnnnnnnnnnnnnnnnnnnnnnnnnnnnnnnnnnnnnnnnnnnnnnnnnnnnnnnnnnnnnnnnnnnnnnnnnnnnnnnnnnnnnnnnnnnnnnnnnnnnnnnnnnnnnnnnnnnnnnnnnnnnnnnnnnnnnnnnnnnnnnnnnnnnnnnnnnnnnnnnnnnnnnnnnnnnnnnnnnnnnnnnnnnnnnnnnnnnnnnnnnnnnnnnnnnnnnnnnnnnnnnnnnnnnnnnnnnnnnnnnnnnnnnnnnnnnnnnnnnnnnnnnnnnnnnnnnnnnnnnnnnnnnnnnnnnnnnnnnnnnnnnnnnnnnnnnnnnnnnnnnnnnnnnnnnnnnnnnnnnnnnnnnnnnnnnnnnnnnnnnnnnnnnnnnnnnnnnnnnnnnnnnnnnnnnnnnnnnnnnnnnnnnnnnnnnnnnnnnnnnnnnnnnnnnnnnnnnnnnnnnnnnnnnnnnnnnnnnnnnnnnnnnnnnnnnnnnnnnnnnnnnnnnnnnnnnnnnnnnnnnnnnnnnnnnnnnnnnnnnnnnnnnnnnnnnnnnnnnnnnnnnnnnnnnnnnnnnnnnnnnnnnnnnnnnnnnnnnnnnnnnnnnnnnnnnnnnnnnnnnnnnnnnnnnnnnnnnnnnnnnnnnnnnnnnnnnnnnnnnnnnnnnnnnnnnnnnnnnnnnnnnnnnnnnnnnnnnnnnnnnnnnnnnnnnnnnnnnnnnnnnnnnnnnnnnnnnnnnnnnnnnnnnnnnnnnnnnnnnnnnnnnnnnnnnnnnnnnnnnnnnnnnnnnnnnnnnnnnnnnnnnnnnnnnnnnnnnnnnnnnnnnnnnnnnnnnnnnnnnnnnnnnnnnnnnnnnnnnnnnnnnnnnnnnnnnnnnnnnnnnnnnnnnnnnnnnnnnnnnnnnnnnnnnnnnnnnnnnnnnnnnnnnnnnnnnnnnnnnnnnnnnnnnnnnnnnnnnnnnnnnnnnnnnnnnnnnnnnnnnnnnnnnnnnnnnnnnnnnnnnnnnnnnnnnnnnnnnnnnnnnnnnnnnnnnnnnnnnnnnnnnnnnnnnnnnnnnnnnnnnnnnnnnnnnnnnnnnnnnnnnnnnnnnnnnnnnnnnnnnnnnnnnnnnnnnnnnnnnnnnnnnnnnnnnnnnnnnnnnnnnnnnnnnnnnnnnnnnnnnnnnnnnnnnnnnnnnnnnnnnnnnnnnnnnnnnnnnnnnnnnnnnnnnnnnnnnnnnnnnnnnnnnnnnnnnnnnnnnnnnnnnnnnnnnnnnnnnnnnnnnnnnnnnnnnnnnnnnnnnnnnnnnnnnnnnnnnnnnnnnnnnnnnnnnnnnnnnnnnnnnnnnnnnnnnnnnnnnnnnnnnnnnnnnnnnnnnnnnnnnnnnnnnnnnnnnnnnnnnnnnnnnnnnnnnnnnnnnnnnnnnnnnnnnnnnnnnnnnnnnnnnnnnnnnnnnnnnnnnnnnnnnnnnnnnnnnnnnnnnnnnnnnnnnnnnnnnnnnnnnnnnnnnnnnnnnnnnnnnnnnnnnnnnnnnnnnnnnnnnnnnnnnnnnnnnnnnnnnnnnnnnnnnnnnnnnnnnnnnnnnnnnnnnnnnnnnnnnnnnnnnnnnnnnnnnnnnnnnnnnnnnnnnnnnnnnnnnnnnnnnnnnnnnnnnnnnnnnnnnnnnnnnnnnnnnnnnnnnnnnnnnnnnnnnnnnnnnnnnnnnnnnnnnnnnnnnnnnnnnnnnnnnnnnnnnnnnnnnnnnnnnnnnnnnnnnnnnnnnnnnnnnnnnnnnnnnnnnnnnnnnnnnnnnnnnnnnnnnnnnnnnnnnnnnnnnnnnnnnnnnnnnnnnnnnnnnnnnnnnnnnnnnnnnnnnnnnnnnnnnnnnnnnnnnnnnnnnnnnnnnnnnnnnnnnnnnnnnnnnnnnnnnnnnnnnnnnnnnnnnnnnnnnnnnnnnnnnnnnnnnnnnnnnnnnnnnnnnnnnnnnnnnnnnnnnnnnnnnnnnnnnnnnnnnnnnnnnnnnnnnnnnnnnnnnnnnnnnnnnnnnnnnnnnnnnnnnnnnnnnnnnnnnnnnnnnnnnnnnnnnnnnnnnnnnnnnnnnnnnnnnnnnnnnnnnnnnnnnnnnnnnnnnnnnnnnnnnnnnnnnnnnnnnnnnnnnnnnnnnnnnnnnnnnnnnnnnnnnnnnnnnnnnnnnnnnnnnnnnnnnnnnnnnnnnnnnnnnnnnnnnnnnnnnnnnnnnnnnnnnnnnnnnnnnnnnnnnnnnnnnnnnnnnnnnnnnnnnnnnnnnnnnnnnnnnnnnnnnnnnnnnnnnnnnnnnnnnnnnnnnnnnnnnnnnnnnnnnnnnnnnnnnnnnnnnnnnnnnnnnnnnnnnnnnnnnnnnnnnnnnnnnnnnnnnnnnnnnnnnnnnnnnnnnnnnnnnnnnnnnnnnnnnnnnnnnnnnnnnnnnnnnnnnnnnnnnnnnnnnnnnnnnnnnnnnnnnnnnnnnnnnnnnnnnnnnnnnnnnnnnnnnnnnnnnnnnnnnnnnnnnnnnnnnnnnnnnnnnnnnnnnnnnnnnnnnnnnnnnnnnnnnnnnnnnnnnnnnnnnnnnnnnnnnnnnnnnnnnnnnnnnnnnnnnnnnnnnnnnnnnnnnnnnnnnnnnnnnnnnnnnnnnnnnnnnnnnnnnnnnnnnnnnnnnnnnnnnnnnnnnnnnnnnnnnnnnnnnnnnnnnnnnnnnnnnnnnnnnnnnnnnnnnnnnnnnnnnnnnnnnnnnnnnnnnnnnnnnnnnnnnnnnnnnnnnnnnnnnnnnnnnnnnnnnnnnnnnnnnnnnnnnnnnnnnnnnnnnnnnnnnnnnnnnnnnnnnnnnnnnnnnnnnnnnnnnnnnnnnnnnnnnnnnnnnnnnnnnnnnnnnnnnnnnnnnnnnnnnnnnnnnnnnnnnnnnnnnnnnnnnnnnnnnnnnnnnnnnnnnnnnnnnnnnnnnnnnnnnnnnnnnnnnnnnnnnnnnnnnnnnnnnnnnnnnnnnnnnnnnnnnnnnnnnnnnnnnnnnnnnnnnnnnnnnnnnnnnnnnnnnnnnnnnnnnnnnnnnnnnnnnnnnnnnnnnnnnnnnnnnnnnnnnnnnnnnnnnnnnnnnnnnnnnnnnnnnnnnnnnnnnnnnnnnnnnnnnnnnnnnnnnnnnnnnnnnnnnnnnnnnnnnnnnnnnnnnnnnnnnnnnnnnnnnnnnnnnnnnnnnnnnnnnnnnnnnnnnnnnnnnnnnnnnnnnnnnnnnnnnnnnnnnnnnnnnnnnnnnnnnnnnnnnnnnnnnnnnnnnnnnnnnnnnnnnnnnnnnnnnnnnnnnnnnnnnnnnnnnnnnnnnnnnnnnnnnnnnnnnnnnnnnnnnnnnnnnnnnnnnnnnnnnnnnnnnnnnnnnnnnnnnnnnnnnnnnnnnnnnnnnnnnnnnnnnnnnnnnnnnnnnnnnnnnnnnnnnnnnnnnnnnnnnnnnnnnnnnnnnnnnnnnnnnnnnnnnnnnnnnnnnnnnnnnnnnnnnnnnnnnnnnnnnnnnnnnnnnnnnnnnnnnnnnnnnnnnnnnnnnnnnnnnnnnnnnnnnnnnnnnnnnnnnnnnnnnnnnnnnnnnnnnnnnnnnnnnnnnnnnnnnnnnnnnnnnnnnnnnnnnnnnnnnnnnnnnnnnnnnnnnnnnnnnnnnnnnnnnnnnnnnnnnnnnnnnnnnnnnnnnnnnnnnnnnnnnnnnnnnnnnnnnnnnnnnnnnnnnnnnnnnnnnnnnnnnnnnnnnnnnnnnnnnnnnnnnnnnnnnnnnnnnnnnnnnnnnnnnnnnnnnnnnnnnnnnnnnnnnnnnnnnnnnnnnnnnnnnnnnnnnnnnnnnnnnnnnnnnnnnnnnnnnnnnnnnnnnnnnnnnnnnnnnnnnnnnnnnnnnnnnnnnnnnnnnnnnnnnnnnnnnnnnnnnnnnnnnnnnnnnnnnnnnnnnnnnnnnnnnnnnnnnnnnnnnnnnnnnnnnnnnnnnnnnnnnnnnnnnnnnnnnnnnnnnnnnnnnnnnnnnnnnnnnnnnnnnnnnnnnnnnnnnnnnnnnnnnnnnnnnnnnnnnnnnnnnnnnnnnnnnnnnnnnnnnnnnnnnnnnnnnnnnnnnnnnnnnnnnnnnnnnnnnnnnnnnnnnnnnnnnnnnnnnnnnnnnnnnnnnnnnnnnnnnnnnnnnnnnnnnnnnnnnnnnnnnnnnnnnnnnnnnnnnnnnnnnnnnnnnnnnnnnnnnnnnnnnnnnnnnnnnnnnnnnnnnnnnnnnnnnnnnnnnnnnnnnnnnnnnnnnnnnnnnnnnnnnnnnnnnnnnnnnnnnnnnnnnnnnnnnnnnnnnnnnnnnnnnnnnnnnnnnnnnnnnnnnnnnnnnnnnnnnnnnnnnnnnnnnnnnnnnnnnnnnnnnnnnnnnnnnnnnnnnnnnnnnnnnnnnnnnnnnnnnnnnnnnnnnnnnnnnnnnnnnnnnnnnnnnnnnnnnnnnnnnnnnnnnnnnnnnnnnnnnnnnnnnnnnnnnnnnnnnnnnnnnnnnnnnnnnnnnnnnnnnnnnnnnnnnnnnnnnnnnnnnnnnnnnnnnnnnnnnnnnnnnnnnnnnnnnnnnnnnnnnnnnnnnnnnnnnnnnnnnnnnnnnnnnnnnnnnnnnnnnnnnnnnnnnnnnnnnnnnnnnnnnnnnnnnnnnnnnnnnnnnnnnnnnnnnnnnnnnnnnnnnnnnnnnnnnnnnnnnnnnnnnnnnnnnnnnnnnnggacagtcggatttccacgcacccattctactacctcatatcgccatcgcatacattcacccacgggcacagcccgtggaactctgcccttcgggttctttagacgctgtggtaacaaatcgtcaaaacgttaccggatgtcgtgccgcgtggttgaacagacctgtttctctgccccattgaagaaccttcggtcaggttcctgtcccggggcaaatccgcacgatgacggcactggcttttagggatgattcaattcagagcccgagcatctcgttttccggtcctgggggttctccctccctggctgcctgaatttggcggttgatttcggggggaacatcgagaccaagctgtttgaaccgcttctctgtccatcgaccgacgttacgcgggtccttgtagtagtcatgtcggggtgttagtgtgggttctcctgcttcctccagtacgtcgtttgccgaccggtggtaggcgaaggaggacatgacccgctcgatcttgccacggccgcactccggacagttatgcgatggcgatgccgaataggtgcgaaaaaggacgctgaacttcctatcgcatcctttacagcgaaactcatatatgggcatggctatcgtccgcccctatctcaatctttcggcgccttgaagggccagcgtctcacttacgccgtcttcgatcatagaagcgcgggcgtcccggaacaacttctccaccaggaaatccttgctcaggccatacccgccgaaaagctggatagccatgctggcaacacggaaggctgtttccgtacccaatatcttgactgcaatagaatactgaagcgccccaggtggattggcagagttgtatgcggacacgcgccgactcagcgaacgtgccgcctcgacctgaatgaacatatcgaacaaccttgctttcacgctctggtgctcgaagatgactttgccgccctgtaccctctgcatgcagtactggtacgcctcatcgaacgcggcctgagcgcagccgattgcaggcaagcccgtaccggcagtcgtgcccgtgagcagtgattcgtactgcgccggatacgtcttcgggtctttccagaccatgtattcttcaggtatgtgcacatcatcgaagaatatctctccctggttgagcgacctctgtcccagcttgttcagtggcttgcctcgcgagactccaggcctgtccaggggaacgaccgccacgccacagtttgtaagcccgagggcgggttcgatggctacaaacagcgccgcatgactggccagcgttccattagatacccaggcagacttctgaccgttgatgatgtattctttgcccactttttttgcgcggacctggggcgtaaccctggggctggacaccgcttccccggcggagtacaaccagtctgagccgtggtccggctctgtgatagcccaacacccggtgtatttcgcgtcattatcctttatatagttcatgccaagctccaccagggccggcacgcccgaccccagtcccatgaagtacgggaacccgtggcacccgaggctgatacaaagaccgaggtcggcatagccctcctcttcagtcaacaggttacgggtcagcgggtcgagttccagcccgccaagtgcttttgagaaaccggtgcggtggtacccctgtcggaaagtctcccgcatgacatcccagtaaatcgaattcttggcgatgacgtcctgggggtcaggcatcctgtctagcttgatgcccgcgggcctccacacctctttgaagaatttcctcgcctccctgcggatagtcttctgttcatctgtcaggtcgacattaagttccagcaaacccatagcgctcctccttcaaaatgctttgattgacgtgcacgcgaacaccgtgcaggagaatggtaccaagtatggtgtgacctgtcaatttcggcattggcccctcttatccacctagaatccgtaatgttttggggccaagtcaacgccggtccgaaacgtctctgcatatttgagcatcgcaatcgcctcacgtcatagacttggccagaaataggctgcagaaatatcgcaaaatgactgaaagtgactcaacaattcatcgtttcgttcactcgccgcaccgcaaaatggcggaataggcgactttccagccaccttaaatatcgtcttttgcagaacgaccagcggtaaaatagtggtaaaactcgtgatttttcgcaatcgattgctggctctctcttgttaacggtaaataatgtgtaaaacgtacccttctaagcacgtaataacaagctatcgaatcaaagatcttgcgtgtcgcgctttgcatgaccaaggtgaagacgagacggtcctgacttggctagattgaaagccaattcaaaggtcttggttctgcgtattgtacgctgtagcccaccaaaggttacttttgttaaaccgttttccacccccttttttaaatcatcattcaagtttaatcgacaactgattcgacgtgttttaagatcttcactgggaacgacagttacccccagtcgggcaattagctcttgtttatcctcgaagctagcatattccaggttttgcgaacgtaaagataaaagatccttacggacagattccggattgaaattctccctcatgtacatgtcattgatgtgctctatttcttgctcggcactggcaattgtttgtctcaattctttaactttgatccccaattccgcgtccgaatagacgcccttttcccaaccgtcctgtatccttgataacctctggttagattgcttgattttgttttcttccagccgaattaatttatctttgtcctgaagccgattttgttcttcgcctagctgtgcctgcagccacgtatcatcgtgcagcaagtggcatacttcttcccagacactatcatcccaggttgcaggaatgaatttccggtagttgcagggatcctttatccaggaacaatagtgagcccggcaataatagaatacctcgtcactgccagcttctttgcgcattacagacattggtttattacactttgggcaaagtatccgggtgcgcagtaatgctttaatggatttcccctgtttacctctgcccctccctctttctttgatgctctggtttgccagacgccagagctcttctgtggtgagagcgggtacattgtaaggtattctttccttttccggtttggggcgtattagcgttcgtttaacacccatagtagggtcaccgaaaggacgctctgggttattgaagaggccgttgacgttatactccgccttgcctgtgtaacacttgcgattgactattttaatcaccgtacggggcatccacgtttcacgttgcggtggtgggattcttagtttatttaattcagcggccacccaataacaagttcgcccctgttctccagtccagatgaaaatgttgtgcactacccaagccggtgaattggggaaaagactaccatcgatatcagccttctcaatttgccatttagcactatttaccttaaccctgccggtacgctggtctataaccttatccgcaatcatagtgtatccataaggcacccggtgacagggtacttttccattcataacacgcgagatgttaccggcaagcacattatcccggttggactttactctgagcgagttggcttgggcttgaatcagtctggtagtctggctcccccagtcgttaccggtgggggagtcgccgcagacaagcttgaccccatagtgaatgcattcacgttcgagggtaatctggtgcaatgggtcagctgaaagtctcccctgaaatgggacaataactccggaaatttttctgcccgtaataaggtcatgtcgcaaatacttcatgccgggacggtcaaagttttcactcgaccttgcatcataaataatatattcacgaggcacaatcgctccgtattcttttgccaacttagcacaggttagaaagtattctccgagacggtcattttcagattgctctctggtggattgcctgttataggctacccaccaatcccgttttgtgagatcgcacccagtaacaccaaagccttcttcataccctgcgagacgggctgcttctttaatgtagttgttgacacgttcttcgctaataatttctatctggcttaccatcttcgtttctccttttaaaaatcagttctagtatttttttctttgcttcggcgtcaacttcaggtgaaattggttcataaacaaatacactttgtgtctggttttgctggttggtcctctggttcaaaatgatctttgccagatcattcacgagcgtcccgtccaaggcgctatcaatattaaggagaatatttcttctggcaagttcctttaaagcgcgagattgtgtcctctcattgaaaaacagtcccttttctttcagttcggcccggagtttggcattgttgtcatccggtaccccactttcccagccatacttctttgccattatctcgataacagctccgaataatggtttctgcaaagacactttagcggcaggattaacagaaaatgcctcctccatttttgttaccacgtcaccgatcagcagcttgcagcttaagctgaagatttcatctggtaagtcaatatccgacatggtacctatattcagaatgaagtccctcatctgttcaactaaagcatccttcctatcctgtggcgtttctgctaacaagataagtaataaattgttcataaatttaaaggcggctccggtttgatctttctcgggatcttgatttgctccaacattgccttgctcagcaaccaatgcagttatttttggatgaacccttaacatgaattcagctttgtcttggtgggttagatcggcccagccgttcacgatgtccccaatggttaaactggtattatcgccagactggttggtttgtttaacgtattgctgaaagacacgctgaagaccctcggattttcgcctaaatctttttttctttactaatctatctaaatcgacttgtagcagggaactggttaaggcactagagtcaatgtgaacgtttttaattcgatcacaaaagatttgttgtagtatgcccgaaaaatattcattaccaacaggaccagaagagacacgataaagtaataacacggataatgcctttgcttttcttgataatgtcttcattgcttactccttccgtgctaaaataaaaatgggtacgtcaaggccgattgcgtcgtttttgattgccccaaggcggtagcttgtttcagcaggctaccgcactttttaccctgttatctactcatttgaattccgacctacgccagatggtttaaatcccttgcctttatcttcctctgcgataaatgggcagtcatcacatgtttcatgcatgtagcaggtcattgcatattctacccaagagttgaaactgtctccccaatcgtcttttagcgtaggttggaacttttcccacaattcgccgtcgagggcgaggtttattctatgtctcggctgttctttctgaggaatacacttctttttcatgtaataaactatacatcaacaatatatatatttcaagtttctttctatccgaggggatatttccgtgattatacagagcaattacccgggaaccgtaacaaataaaaaattgaatacttttcaaaaagggataataacgttcaatttagactgtcttcggtataccgaaatataatgtactattatatgggacaagcggcctcaaagtcaggcgactacaaaactgggaaaaattcgtaatacgataaaacatggcctgaagttgagctgaggtagcgtttgagattaccattggataactctggtcttggttgtggactgagggagttaggcaacgaccagcatgtcaattaatattttcaattgtaatatgaccttgagttttcgacttggctgctggctaactatttactaacccggagtcctgtctttgaaatcccttctttttagttttgtcgtaaacgaccgtatctgtcgctcgtctgtgttatactagggcagaaattgcaattccacctgcggacaaatgaaaaaggaggagcaagtgaaagataaagatagtctcgcccgggcagttcgtctcagccaaatacaacactttctctacagtaatccgtcaggtctcacgagcaaagaattagctgatctttgtggagtctgtatgcgaacgattcaaagagatattcaatcacttgatactgaccttaagatacctctgacgcagaacggagaccggtatgggattactgaaggctacattctgccaccggtttccctctcactttatgaggcaatggtaatatttctggcgtgccgtctagcgctccgtcagaccgatgagaacaacccgcatatcgaaaaagctcttacaaagatttcctccgtattgccttcaccccttgcgatacgtttgaaagagagcgccagttcggttggcgataaaaaggaagacttagagtttatacgtaactttgagaagattgcaatcgcatggacaacacaacgccaggtgagaatgaagtaccagtcttttgaaagcgaaggcatcaaggaatggtttctggaaccttatttcgttgatatgacgggtgttggcttctccgtctacgtcatcgggcatgctgtgagggaaggaaaggaaggcattattaccttcaagcttgaacgtatgaaagatttggaggtcttgaacaagcggttcgagattccccctgatataaatatcgggaagttgttagcatcaagctggggtattttcaccggagatgcaattagcattgttctgaaattttcaccacatgtgacacgccgcgtaaaggaatcagtgtggcatatttcacaattaattgaggaaactcccgatggcggatgccggctctctttacaggtaaacagtgcattggaaataaccccctggatacgtagttgggggccggatgtcgaggtaattgaaccgttgcgtcttaaagagcaattccgagactggagcgaaacactttacagattgtatcacgaataggtgttttgacaacgaaaatagaacaaatgtatgattagctctgccaagaaaagatacattgcaggtataacaacacgcgcggaggataacattgaaatacaacctgcttgaggagcactggattcctgttctcggaaccgatgggaagcttggctacgtgggtatcaaggatacgctgacccatgcagggcgcatccgttgtatctgcttagcaagcccactcgacatgttcgccgtgcaccggttcctgcttactttgctttattggaaagcagacttagcgggtggggtggaagaggttcgggcgtcgttgctgaagagcgaattgccgagcgcggtgctcggcggtatcaacaaggaagaccattgttttgacctcttcgataaagaatcgccattcctgcaggacacgtctgtatccatctccaaggaaaaagaaaagaagtcggtcggctctttgtttgctgaattagctgtggctactaacatagcccactttcatcacggcgacgatgagagtatgcggctatgcctgccgtgcgcaaccatcggcctgctccgtgtggttccgtggagccaatcaggcggccaaggaaagactccctcggtacacaatgcgccgccaattatggcaatggcaactggcgataacttggcggccacgcttggtttgaaccttgtaccgttggatactaaagcgggcaaagcgcagtggtccggctactttacgccgactgattcgacgagtccaatcccctatctcgaggcgctaacttggaatccccggcgcatccttctcccctcagcccaagaaggcacttgctggtactgcggtgaaagcaatgtacccacggtcgggaaaatcgtgtacatgaaaaacgaaaacacaaaaaagcgtgcagacgagaaattgttcgaatggcaggatccggctgccttttatgctctatacgatgtgagtaagaaatatgacaaagtcaagaacgtgccgtataaaacgataaaaagttcccgggagaacttggctaccgatggccgagacttgcagcgcctggcgcatgacgatccgtttcccgaatctaccgtagtcgtgaagaaccccaagcatgagggttggctcctggtcgttccatgcacaaatcccgcgaacaacaaaacctacgatcatcggcaggttgagctggcacaactttcaccagagacgattcgctccttaccgcctgccgtccccccgtccaggagacagggcatcgacggttggaaagaacccgaaagagtcgagcgcaaggacgttgagcattttgtgccggctgcggtgaggcttcttacgcataccgattgggttacgctatcgaacgctgcctacatggatatgcacgattcaccagcggcgttcgatgtttttagcggcttgtattggggacttcgtgacaagaagaccaaaggacttccgtcgcggaatgtggcgtggttgatgctcaaactgatggcatcagtccccgcacgtgcccgcactcttcatcccaacgccgaattctgcccgctgcagagactgccgaaacgacagagcaatgagcgcgacatggcgtccccctaccctgtttctttcccacgcggtcgtcggcttgaggccgcacttagcgccgcacttgttgacaatctgcgcaagagaaatcccgaacctgttgactggacacgtctatgttacggactagaccaattactcgactaattaagagaatcgaaaaaggagaaacattatgtttgtacagattcatatcctccagagcatgccaccaggaaacttaaaccgagatgacgaagggcagccgaaaaagtgtatttttggcggcgtcacgcgcggccgcatcagcagtcagtgcctcaagcgaaatatccgccattctatacaattcaaagaagtgttcggcgatgacctcgcaaccagaacgacatacctgccacgtatggtggccgacgaattgaggaagagcgacccaagcattaccgatgacgaattgaacaaagtcaaggccgcgcttgccagcaaattcaaggctgaaaagcgcggaggcaattcagacgaagcagcagagggtgaggaggcacaagcgcagcccgaaagctcttctgctgtgagcgatggagcagaccggacgggtcaactggtctttttcccaccaccctttgctaaagaaattgctgagcttgtcgtagaactgcgtgggcgcacccctccggcatacaaccggttcattgggaccaaagcaaagctctctaaagctgaagagaaggctctagacaaaacggttgatgagtttgtccagcgagcttccgcggcgagcaagaagctcacggttgacatcggccttttcggcagaatgactaccagtgacctggtcgtgaacgtggaagcagcctgtcaggtggcgcatgccattagcacgcatgagacgctaatcgagagcgactacttcaccgcgatggatgaaaagaagcaggaattcgcatcaactcagaccgagaaaacaggcgctgcctttctcggctctggcgataccgaaacgtttttcaattcagccgtctactacaagtatctcaatctcgacatcgatgccttgaagaagcacctttcctggcaaagcgataaggcagctcttgcagccggggtgcttgtccgcgccgcggcgctatccaatcccacaggcaaacagaacagctttgccgcgcacggcgttcctgaacttatcctcgtcgaagtatcggaagcaaagtgtccaatcagctatgcaaatgccttcctagaacccgttgacggtattaacctcatgcgtgaatcagcggcggcaatgagtaattacatcgacaccgtagtagcagccttctcgccgacagacatgagccgagcgctcctggcagtggggtctgcttcggtagatatcgcaaaagctaaaagagttaacacactcgaagaccttatcaaatccgtggttaaactcgtggagggtaccgcatgagcagtgaccacaatactttgtttctgcgcttggccggtcccatgcaggcgtggggcacctcatcccgttttcagttgcgccgcactgacctttacccgagcaagtccggcatactgggaatgttgctctgtgccatgggtgttaatcgtgaagattcacggcagccgctcaagctgctgacaccactactcatgggagtacgcgtcgaccggactggaaatcttgattgggattaccagacagcgggagccaagttaggcattcgaagcgccgacggcaaaatcaagataaccgcatcgaccggcgaatacgaaaccttgctttcgcgccgtcaatatctttttgatgcctcatttctggttgcgttacatggcgattcaaccataatcgcctcttgcgccaacgccctgagaaatccgacctggcctttgttccttggaagaaagtgctgcgtcccggccgagcctgtttacgccggcaccgaaagttttgacacgctgacccaagcgctttcgtcggtcccctggcgccccagaatcaacgccattgaccgcgagggtagcggggcgtctgtaacactcgatacatatttggagcagccgccagagagacttgtgcccatgggtgcccggctcgtttccgatgtgcccgtagccttcggtttctataattatgctccgcgtttggttatcaagaatcaggttacggtgccaatgggacaggcaacccaaacacagcgactgagcgcacgtcatggcaacccttacagtgaacacttctatacagtcgcgaggccgagtcgtctgaaacttgataacggcctttgcgtcttctgcaagtcccctgctgtggaagtgcatcatgtgtcctacgaaaatgccggacacgagaccgactctgatctccggtcgttatgcaagacctgtcacgatgcgtgtacgatgctggaatacggtcatggccgaaaagaaagagttgacccttgcaacccggctcaacgcacgaccattctcgaacaaatcaatcgtaatctcaaagagcaacatcctggccggcggcgcgaattgcttaaagctgtgcggtcgacctgagaaggtattttttgacatagcgcccggcgcaatgccggataaggagttagggatgtttctttctcttcttaaagttgacttggacattgcccccggacggctctggctccgtaacctttaccgcgttcatcagcgcctgtgcatggcgtttccatcctccgcgcgcaaagagggcgaccctccgttcttggaaccctttcgtcctgatgacttccagcatgttcacggcccgcgcacggaggaacaagcatttcttttccgcattgaccctctacccggcgggaatgctgcgattgtgatgcaatctggaatgaagccggactgggactatgcctttaacaacgctggctatcttcttgccgcgccaccccagttgaagacttatgaaccacaattccagaaccagcagcttctcaggttccgtctgctggcaaaccccacacggaagatagatacgaagacccgccaggatggcaccaaaagcaacggtaagcgagtccccgtggacaaggctaacctcgatgaatggctcatccgccatgccgaaaagtccgggttcaccgtcgagcagttgctcaacgtgcaaacgggctacgtcggcgcttccaatggcaaagatgacgaactcaagcggttcttctacgcccgctacgacggcatactccgtgtggcggatgctgagcatctgcacgattccgtcattcagggcattggctccgccaaaggcttcggcttcgggctgctttctctagcgcgtatcaaggagtagctatgcgtacattacatgaattgccgcgtttccgtgatagatggagccacctctacatggaaatggggcggctggatgttgatgcgaatgggttggtattccagcagggtgagagcttcgtgcgggtgccaattgaccagttaagcatcattatgctgggacccggctccacggttactcatgcggcggtgaaatccctttcccagaataactgcttattatcatggacagggcaggatggtattcggctctatgcggcaagcattggtggcacctacagcgcacggaggatgattcgccaggcgaaactggttagtgacgaggagaaacgtctggaagttgcctggcgtatgtaccgtttccgctttaaagaagcggttcctcaggtggttagtctggagcaaatccggggtatggaaggcatacgcgtgcgtcgcacctatgccgaggcttcagctaaatacggggtggaatggaaaggtcgccagtatgaccaggatgattggaacaaaggtgacccaatcaaccgcgctctatccgcggcgaacgcttgtctctatggagtttgtcacgcaggtattctttcagctggctattcatccgctctgggatttgttcacacgggtaaaatgctaagcttcgtttatgacatcggagacctctacaaaaccgaggttacaatccctactgctttcaggatagctgctcaaaatccaccggaattagaaagagtagtacgcatggagtgccgaaaggtgttccacgaattcagactgatggataggctcttgcctgacatcgcggaggtgctgggtgttagtgatgatactggagaaaacgccgacgagcttgaagggcgcattgtcacgctggctgttggaaccgaagacgggggtttttcttgggaacccgagcgcgagagttagagacgaactttgggcaacagcggtgaaaaaggcaaaggataccggcgtggtaatgcaaatctggacagaccagaacccgcaaggtttttcttaccggcaaactggtgaaagggatcggagatttattgacctggatggtctggcattggttgagttcaaacgcgctcaagagattgtcaaaagcaatttttctgacactagaacaccctagctaggcatgaggcataaaccggttagctttgggattgcagagtattccccacgtgtgtgggggtgaaccatagtcgtggcgcacattctggatggcatatcccgtattccccacgtgtgtgggggtgaaccgcatactctgcatgtctgacctgccctgggcaggtattccccacgtgtgtgggggtgaaccgaaacacactggccggacgaatacaatcagttaagtattccccacgtgtgtgggggtgaaccgcaacccatgcggtggctttggcttcctggtaaggtattccccacgtgtgtgggggtgaaccgcacgttgttttaacttctggtactttcaatatagtattccccacgtgtgtgggggtgaaccgcaataccgtccttctggaattggaaaggttcatgtattccccacgtgtgtgggggtgaaccgtcagcacagcgtgacggtgttccgcatggcctgtattccccacgtgtgtgggggtgaaccggactcttttgccaacgtgtgaacccctagtgcgtattccccacgtgtgtgggggtgaaccgggatgggagtggaccaaagcgatcgtgtgaccgtattccccacgtgtgtgggggtgaaccgtgcggtacacacagcgccaagttggatgttgccgtattccccacgtgtgtgggggtgaaccggacgatggccagcccaattactcaaaggctgtgtattccccacgtgtgtgggggtgaaccgcgtgctgaccgtatttattgctctaaggagtggtattccccacgtgtgtgggggtgaaccaggattctctaacgcccaaaaggcagggcttgatgtattccccacgtgtgtgggggtgaaccgtaccaacgagggcgccggcgggaacgagtgtagtattccccacgtgtgtgggggtgaaccgggatactgcgggaagctctgcctttggaagggagtattccccacgtgtgtgggggtgaaccgctcttgagttgggtaaagctccaggagtggaggtattccccacgtgtgtgggggtgaaccgtgcaggcggccgctaaaggcgtcaaggctgaagtattccccacgtgtgtgggggtgaaccgagatggtaatcggcgcagtcgtaacattaagtgtattccccacgtgtgtgggggtgaaccccattccggccggtggttccggcacaccaggtcgtattccccacgtgtgtgggggtgaaccggactatgagtttggagatgttaagaaaattaagtattccccacgtgtgtgggggtgaaccaggtaagtggtcggccggactctggcacgagttcgtattccccacgtgtgtgggggtgaaccgctctgcgagcggttcgagacctgataggcgatgtattccccacgtgtgtgggggtgaaccgcaccttatagtgggggattcgccagtgaaaacgtattccccacgtgtgtgggggtgaaccgtcccccgacagggtatatttttacccgactacgtattccccacgtgtgtgggggtgaaccgcactggactgggacgggctataccagcgcacacgtattccccacgtgtgtgggggtgaaccagttcaagcatcgtgttgggacaaaaggcggtagtattccccacgtgtgtgggggtgaaccggtcacggtgtacgaaagtatctgtatccagttgtattccccacgtgtgtgggggtgaaccgacctcataacaagccacgatgcttttacattcgccgtaaatgcgaaagtattccccacgtgtgtgggggtgaaccgggaactgcctgcttcgtcaagcctcatcaaccgtattccccacgtgtgtgggggtgaaccgcctacatagcgggatttattgacggggaaggtgtattccccacgtgtgtgggggtgaaccggactgttcatcctccagttgggataatccagtgtattccccacgtgtgtgggggtgaaccgcagtatcaggcagatggtaatcaggcgtttgcgtattccccacgtgtgtgggggtgaac

SEQ ID NO: 500 - DNA, 103712 bp, Artificial Sequence
  Synthetic Oligonucleotide
  misc_feature (1)..(92526): n is a, c, g, or t
nnnnnnnnnnnnnnnnnnnnnnnnnnnnnnnnnnnnnnnnnnnnnnnnnnnnnnnnnnnnnnnnnnnnnnnnnnnnnnnnnnnnnnnnnnnnnnnnnnnnnnnnnnnnnnnnnnnnnnnnnnnnnnnnnnnnnnnnnnnnnnnnnnnnnnnnnnnnnnnnnnnnnnnnnnnnnnnnnnnnnnnnnnnnnnnnnnnnnnnnnnnnnnnnnnnnnnnnnnnnnnnnnnnnnnnnnnnnnnnnnnnnnnnnnnnnnnnnnnnnnnnnnnnnnnnnnnnnnnnnnnnnnnnnnnnnnnnnnnnnnnnnnnnnnnnnnnnnnnnnnnnnnnnnnnnnnnnnnnnnnnnnnnnnnnnnnnnnnnnnnnnnnnnnnnnnnnnnnnnnnnnnnnnnnnnnnnnnnnnnnnnnnnnnnnnnnnnnnnnnnnnnnnnnnnnnnnnnnnnnnnnnnnnnnnnnnnnnnnnnnnnnnnnnnnnnnnnnnnnnnnnnnnnnnnnnnnnnnnnnnnnnnnnnnnnnnnnnnnnnnnnnnnnnnnnnnnnnnnnnnnnnnnnnnnnnnnnnnnnnnnnnnnnnnnnnnnnnnnnnnnnnnnnnnnnnnnnnnnnnnnnnnnnnnnnnnnnnnnnnnnnnnnnnnnnnnnnnnnnnnnnnnnnnnnnnnnnnnnnnnnnnnnnnnnnnnnnnnnnnnnnnnnnnnnnnnnnnnnnnnnnnnnnnnnnnnnnnnnnnnnnnnnnnnnnnnnnnnnnnnnnnnnnnnnnnnnnnnnnnnnnnnnnnnnnnnnnnnnnnnnnnnnnnnnnnnnnnnnnnnnnnnnnnnnnnnnnnnnnnnnnnnnnnnnnnnnnnnnnnnnnnnnnnnnnnnnnnnnnnnnnnnnnnnnnnnnnnnnnnnnnnnnnnnnnnnnnnnnnnnnnnnnnnnnnnnnnnnnnnnnnnnnnnnnnnnnnnnnnnnnnnnnnnnnnnnnnnnnnnnnnnnnnnnnnnnnnnnnnnnnnnnnnnnnnnnnnnnnnnnnnnnnnnnnnnnnnnnnnnnnnnnnnnnnnnnnnnnnnnnnnnnnnnnnnnnnnnnnnnnnnnnnnnnnnnnnnnnnnnnnnnnnnnnnnnnnnnnnnnnnnnnnnnnnnnnnnnnnnnnnnnnnnnnnnnnnnnnnnnnnnnnnnnnnnnnnnnnnnnnnnnnnnnnnnnnnnnnnnnnnnnnnnnnnnnnnnnnnnnnnnnnnnnnnnnnnnnnnnnnnnnnnnnnnnnnnnnnnnnnnnnnnnnnnnnnnnnnnnnnnnnnnnnnnnnnnnnnnnnnnnnnnnnnnnnnnnnnnnnnnnnnnnnnnnnnnnnnnnnnnnnnnnnnnnnnnnnnnnnnnnnnnnnnnnnnnnnnnnnnnnnnnnnnnnnnnnnnnnnnnnnnnnnnnnnnnnnnnnnnnnnnnnnnnnnnnnnnnnnnnnnnnnnnnnnnnnnnnnnnnnnnnnnnnnnnnnnnnnnnnnnnnnnnnnnnnnnnnnnnnnnnnnnnnnnnnnnnnnnnnnnnnnnnnnnnnnnnnnnnnnnnnnnnnnnnnnnnnnnnnnnnnnnnnnnnnnnnnnnnnnnnnnnnnnnnnnnnnnnnnnnnnnnnnnnnnnnnnnnnnnnnnnnnnnnnnnnnnnnnnnnnnnnnnnnnnnnnnnnnnnnnnnnnnnnnnnnnnnnnnnnnnnnnnnnnnnnnnnnnnnnnnnnnnnnnnnnnnnnnnnnnnnnnnnnnnnnnnnnnnnnnnnnnnnnnnnnnnnnnnnnnnnnnnnnnnnnnnnnnnnnnnnnnnnnnnnnnnnnnnnnnnnnnnnnnnnnnnnnnnnnnnnnnnnnnnnnnnnnnnnnnnnnnnnnnnnnnnnnnnnnnnnnnnnnnnnnnnnnnnnnnnnnnnnnnnnnnnnnnnnnnnnnnnnnnnnnnnnnnnnnnnnnnnnnnnnnnnnnnnnnnnnnnnnnnnnnnnnnnnnnnnnnnnnnnnnnnnnnnnnnnnnnnnnnnnnnnnnnnnnnnnnnnnnnnnnnnnnnnnnnnnnnnnnnnnnnnnnnnnnnnnnnnnnnnnnnnnnnnnnnnnnnnnnnnnnnnnnnnnnnnnnnnnnnnnnnnnnnnnnnnnnnnnnnnnnnnnnnnnnnnnnnnnnnnnnnnnnnnnnnnnnnnnnnnnnnnnnnnnnnnnnnnnnnnnnnnnnnnnnnnnnnnnnnnnnnnnnnnnnnnnnnnnnnnnnnnnnnnnnnnnnnnnnnnnnnnnnnnnnnnnnnnnnnnnnnnnnnnnnnnnnnnnnnnnnnnnnnnnnnnnnnnnnnnnnnnnnnnnnnnnnnnnnnnnnnnnnnnnnnnnnnnnnnnnnnnnnnnnnnnnnnnnnnnnnnnnnnnnnnnnnnnnnnnnnnnnnnnnnnnnnnnnnnnnnnnnnnnnnnnnnnnnnnnnnnnnnnnnnnnnnnnnnnnnnnnnnnnnnnnnnnnnnnnnnnnnnnnnnnnnnnnnnnnnnnnnnnnnnnnnnnnnnnnnnnnnnnnnnnnnnnnnnnnnnnnnnnnnnnnnnnnnnnnnnnnnnnnnnnnnnnnnnnnnnnnnnnnnnnnnnnnnnnnnnnnnnnnnnnnnnnnnnnnnnnnnnnnnnnnnnnnnnnnnnnnnnnnnnnnnnnnnnnnnnnnnnnnnnnnnnnnnnnnnnnnnnnnnnnnnnnnnnnnnnnnnnnnnnnnnnnnnnnnnnnnnnnnnnnnnnnnnnnnnnnnnnnnnnnnnnnnnnnnnnnnnnnnnnnnnnnnnnnnnnnnnnnnnnnnnnnnnnnnnnnnnnnnnnnnnnnnnnnnnnnnnnnnnnnnnnnnnnnnnnnnnnnnnnnnnnnnnnnnnnnnnnnnnnnnnnnnnnnnnnnnnnnnnnnnnnnnnnnnnnnnnnnnnnnnnnnnnnnnnnnnnnnnnnnnnnnnnnnnnnnnnnnnnnnnnnnnnnnnnnnnnnnnnnnnnnnnnnnnnnnnnnnnnnnnnnnnnnnnnnnnnnnnnnnnnnnnnnnnnnnnnnnnnnnnnnnnnnnnnnnnnnnnnnnnnnnnnnnnnnnnnnnnnnnnnnnnnnnnnnnnnnnnnnnnnnnnnnnnnnnnnnnnnnnnnnnnnnnnnnnnnnnnnnnnnnnnnnnnnnnnnnnnnnnnnnnnnnnnnnnnnnnnnnnnnnnnnnnnnnnnnnnnnnnnnnnnnnnnnnnnnnnnnnnnnnnnnnnnnnnnnnnnnnnnnnnnnnnnnnnnnnnnnnnnnnnnnnnnnnnnnnnnnnnnnnnnnnnnnnnnnnnnnnnnnnnnnnnnnnnnnnnnnnnnnnnnnnnnnnnnnnnnnnnnnnnnnnnnnnnnnnnnnnnnnnnnnnnnnnnnnnnnnnnnnnnnnnnnnnnnnnnnnnnnnnnnnnnnnnnnnnnnnnnnnnnnnnnnnnnnnnnnnnnnnnnnnnnnnnnnnnnnnnnnnnnnnnnnnnnnnnnnnnnnnnnnnnnnnnnnnnnnnnnnnnnnnnnnnnnnnnnnnnnnnnnnnnnnnnnnnnnnnnnnnnnnnnnnnnnnnnnnnnnnnnnnnnnnnnnnnnnnnnnnnnnnnnnnnnnnnnnnnnnnnnnnnnnnnnnnnnnnnnnnnnnnnnnnnnnnnnnnnnnnnnnnnnnnnnnnnnnnnnnnnnnnnnnnnnnnnnnnnnnnnnnnnnnnnnnnnnnnnnnnnnnnnnnnnnnnnnnnnnnnnnnnnnnnnnnnnnnnnnnnnnnnnnnnnnnnnnnnnnnnnnnnnnnnnnnnnnnnnnnnnnnnnnnnnnnnnnnnnnnnnnnnnnnnnnnnnnnnnnnnnnnnnnnnnnnnnnnnnnnnnnnnnnnnnnnnnnnnnnnnnnnnnnnnnnnnnnnnnnnnnnnnnnnnnnnnnnnnnnnnnnnnnnnnnnnnnnnnnnnnnnnnnnnnnnnnnnnnnnnnnnnnnnnnnnnnnnnnnnnnnnnnnnnnnnnnnnnnnnnnnnnnnnnnnnnnnnnnnnnnnnnnnnnnnnnnnnnnnnnnnnnnnnnnnnnnnnnnnnnnnnnnnnnnnnnnnnnnnnnnnnnnnnnnnnnnnnnnnnnnnnnnnnnnnnnnnnnnnnnnnnnnnnnnnnnnnnnnnnnnnnnnnnnnnnnnnnnnnnnnnnnnnnnnnnnnnnnnnnnnnnnnnnnnnnnnnnnnnnnnnnnnnnnnnnnnnnnnnnnnnnnnnnnnnnnnnnnnnnnnnnnnnnnnnnnnnnnnnnnnnnnnnnnnnnnnnnnnnnnnnnnnnnnnnnnnnnnnnnnnnnnnnnnnnnnnnnnnnnnnnnnnnnnnnnnnnnnnnnnnnnnnnnnnnnnnnnnnnnnnnnnnnnnnnnnnnnnnnnnnnnnnnnnnnnnnnnnnnnnnnnnnnnnnnnnnnnnnnnnnnnnnnnnnnnnnnnnnnnnnnnnnnnnnnnnnnnnnnnnnnnnnnnnnnnnnnnnnnnnnnnnnnnnnnnnnnnnnnnnnnnnnnnnnnnnnnnnnnnnnnnnnnnnnnnnnnnnnnnnnnnnnnnnnnnnnnnnnnnnnnnnnnnnnnnnnnnnnnnnnnnnnnnnnnnnnnnnnnnnnnnnnnnnnnnnnnnnnnnnnnnnnnnnnnnnnnnnnnnnnnnnnnnnnnnnnnnnnnnnnnnnnnnnnnnnnnnnnnnnnnnnnnnnnnnnnnnnnnnnnnnnnnnnnnnnnnnnnnnnnnnnnnnnnnnnnnnnnnnnnnnnnnnnnnnnnnnnnnnnnnnnnnnnnnnnnnnnnnnnnnnnnnnnnnnnnnnnnnnnnnnnnnnnnnnnnnnnnnnnnnnnnnnnnnnnnnnnnnnnnnnnnnnnnnnnnnnnnnnnnnnnnnnnnnnnnnnnnnnnnnnnnnnnnnnnnnnnnnnnnnnnnnnnnnnnnnnnnnnnnnnnnnnnnnnnnnnnnnnnnnnnnnnnnnnnnnnnnnnnnnnnnnnnnnnnnnnnnnnnnnnnnnnnnnnnnnnnnnnnnnnnnnnnnnnnnnnnnnnnnnnnnnnnnnnnnnnnnnnnnnnnnnnnnnnnnnnnnnnnnnnnnnnnnnnnnnnnnnnnnnnnnnnnnnnnnnnnnnnnnnnnnnnnnnnnnnnnnnnnnnnnnnnnnnnnnnnnnnnnnnnnnnnnnnnnnnnnnnnnnnnnnnnnnnnnnnnnnnnnnnnnnnnnnnnnnnnnnnnnnnnnnnnnnnnnnnnnnnnnnnnnnnnnnnnnnnnnnnnnnnnnnnnnnnnnnnnnnnnnnnnnnnnnnnnnnnnnnnnnnnnnnnnnnnnnnnnnnnnnnnnnnnnnnnnnnnnnnnnnnnnnnnnnnnnnnnnnnnnnnnnnnnnnnnnnnnnnnnnnnnnnnnnnnnnnnnnnnnnnnnnnnnnnnnnnnnnnnnnnnnnnnnnnnnnnnnnnnnnnnnnnnnnnnnnnnnnnnnnnnnnnnnnnnnnnnnnnnnnnnnnnnnnnnnnnnnnnnnnnnnnnnnnnnnnnnnnnnnnnnnnnnnnnnnnnnnnnnnnnnnnnnnnnnnnnnnnnnnnnnnnnnnnnnnnnnnnnnnnnnnnnnnnnnnnnnnnnnnnnnnnnnnnnnnnnnnnnnnnnnnnnnnnnnnnnnnnnnnnnnnnnnnnnnnnnnnnnnnnnnnnnnnnnnnnnnnnnnnnnnnnnnnnnnnnnnnnnnnnnnnnnnnnnnnnnnnnnnnnnnnnnnnnnnnnnnnnnnnnnnnnnnnnnnnnnnnnnnnnnnnnnnnnnnnnnnnnnnnnnnnnnnnnnnnnnnnnnnnnnnnnnnnnnnnnnnnnnnnnnnnnnnnnnnnnnnnnnnnnnnnnnnnnnnnnnnnnnnnnnnnnnnnnnnnnnnnnnnnnnnnnnnnnnnnnnnnnnnnnnnnnnnnnnnnnnnnnnnnnnnnnnnnnnnnnnnnnnnnnnnnnnnnnnnnnnnnnnnnnnnnnnnnnnnnnnnnnnnnnnnnnnnnnnnnnnnnnnnnnnnnnnnnnnnnnnnnnnnnnnnnnnnnnnnnnnnnnnnnnnnnnnnnnnnnnnnnnnnnnnnnnnnnnnnnnnnnnnnnnnnnnnnnnnnnnnnnnnnnnnnnnnnnnnnnnnnnnnnnnnnnnnnnnnnnnnnnnnnnnnnnnnnnnnnnnnnnnnnnnnnnnnnnnnnnnnnnnnnnnnnnnnnnnnnnnnnnnnnnnnnnnnnnnnnnnnnnnnnnnnnnnnnnnnnnnnnnnnnnnnnnnnnnnnnnnnnnnnnnnnnnnnnnnnnnnnnnnnnnnnnnnnnnnnnnnnnnnnnnnnnnnnnnnnnnnnnnnnnnnnnnnnnnnnnnnnnnnnnnnnnnnnnnnnnnnnnnnnnnnnnnnnnnnnnnnnnnnnnnnnnnnnnnnnnnnnnnnnnnnnnnnnnnnnnnnnnnnnnnnnnnnnnnnnnnnnnnnnnnnnnnnnnnnnnnnnnnnnnnnnnnnnnnnnnnnnnnnnnnnnnnnnnnnnnnnnnnnnnnnnnnnnnnnnnnnnnnnnnnnnnnnnnnnnnnnnnnnnnnnnnnnnnnnnnnnnnnnnnnnnnnnnnnnnnnnnnnnnnnnnnnnnnnnnnnnnnnnnnnnnnnnnnnnnnnnnnnnnnnnnnnnnnnnnnnnnnnnnnnnnnnnnnnnnnnnnnnnnnnnnnnnnnnnnnnnnnnnnnnnnnnnnnnnnnnnnnnnnnnnnnnnnnnnnnnnnnnnnnnnnnnnnnnnnnnnnnnnnnnnnnnnnnnnnnnnnnnnnnnnnnnnnnnnnnnnnnnnnnnnnnnnnnnnnnnnnnnnnnnnnnnnnnnnnnnnnnnnnnnnnnnnnnnnnnnnnnnnnnnnnnnnnnnnnnnnnnnnnnnnnnnnnnnnnnnnnnnnnnnnnnnnnnnnnnnnnnnnnnnnnnnnnnnnnnnnnnnnnnnnnnnnnnnnnnnnnnnnnnnnnnnnnnnnnnnnnnnnnnnnnnnnnnnnnnnnnnnnnnnnnnnnnnnnnnnnnnnnnnnnnnnnnnnnnnnnnnnnnnnnnnnnnnnnnnnnnnnnnnnnnnnnnnnnnnnnnnnnnnnnnnnnnnnnnnnnnnnnnnnnnnnnnnnnnnnnnnnnnnnnnnnnnnnnnnnnnnnnnnnnnnnnnnnnnnnnnnnnnnnnnnnnnnnnnnnnnnnnnnnnnnnnnnnnnnnnnnnnnnnnnnnnnnnnnnnnnnnnnnnnnnnnnnnnnnnnnnnnnnnnnnnnnnnnnnnnnnnnnnnnnnnnnnnnnnnnnnnnnnnnnnnnnnnnnnnnnnnnnnnnnnnnnnnnnnnnnnnnnnnnnnnnnnnnnnnnnnnnnnnnnnnnnnnnnnnnnnnnnnnnnnnnnnnnnnnnnnnnnnnnnnnnnnnnnnnnnnnnnnnnnnnnnnnnnnnnnnnnnnnnnnnnnnnnnnnnnnnnnnnnnnnnnnnnnnnnnnnnnnnnnnnnnnnnnnnnnnnnnnnnnnnnnnnnnnnnnnnnnnnnnnnnnnnnnnnnnnnnnnnnnnnnnnnnnnnnnnnnnnnnnnnnnnnnnnnnnnnnnnnnnnnnnnnnnnnnnnnnnnnnnnnnnnnnnnnnnnnnnnnnnnnnnnnnnnnnnnnnnnnnnnnnnnnnnnnnnnnnnnnnnnnnnnnnnnnnnnnnnnnnnnnnnnnnnnnnnnnnnnnnnnnnnnnnnnnnnnnnnnnnnnnnnnnnnnnnnnnnnnnnnnnnnnnnnnnnnnnnnnnnnnnnnnnnnnnnnnnnnnnnnnnnnnnnnnnnnnnnnnnnnnnnnnnnnnnnnnnnnnnnnnnnnnnnnnnnnnnnnnnnnnnnnnnnnnnnnnnnnnnnnnnnnnnnnnnnnnnnnnnnnnnnnnnnnnnnnnnnnnnnnnnnnnnnnnnnnnnnnnnnnnnnnnnnnnnnnnnnnnnnnnnnnnnnnnnnnnnnnnnnnnnnnnnnnnnnnnnnnnnnnnnnnnnnnnnnnnnnnnnnnnnnnnnnnnnnnnnnnnnnnnnnnnnnnnnnnnnnnnnnnnnnnnnnnnnnnnnnnnnnnnnnnnnnnnnnnnnnnnnnnnnnnnnnnnnnnnnnnnnnnnnnnnnnnnnnnnnnnnnnnnnnnnnnnnnnnnnnnnnnnnnnnnnnnnnnnnnnnnnnnnnnnnnnnnnnnnnnnnnnnnnnnnnnnnnnnnnnnnnnnnnnnnnnnnnnnnnnnnnnnnnnnnnnnnnnnnnnnnnnnnnnnnnnnnnnnnnnnnnnnnnnnnnnnnnnnnnnnnnnnnnnnnnnnnnnnnnnnnnnnnnnnnnnnnnnnnnnnnnnnnnnnnnnnnnnnnnnnnnnnnnnnnnnnnnnnnnnnnnnnnnnnnnnnnnnnnnnnnnnnnnnnnnnnnnnnnnnnnnnnnnnnnnnnnnnnnnnnnnnnnnnnnnnnnnnnnnnnnnnnnnnnnnnnnnnnnnnnnnnnnnnnnnnnnnnnnnnnnnnnnnnnnnnnnnnnnnnnnnnnnnnnnnnnnnnnnnnnnnnnnnnnnnnnnnnnnnnnnnnnnnnnnnnnnnnnnnnnnnnnnnnnnnnnnnnnnnnnnnnnnnnnnnnnnnnnnnnnnnnnnnnnnnnnnnnnnnnnnnnnnnnnnnnnnnnnnnnnnnnnnnnnnnnnnnnnnnnnnnnnnnnnnnnnnnnnnnnnnnnnnnnnnnnnnnnnnnnnnnnnnnnnnnnnnnnnnnnnnnnnnnnnnnnnnnnnnnnnnnnnnnnnnnnnnnnnnnnnnnnnnnnnnnnnnnnnnnnnnnnnnnnnnnnnnnnnnnnnnnnnnnnnnnnnnnnnnnnnnnnnnnnnnnnnnnnnnnnnnnnnnnnnnnnnnnnnnnnnnnnnnnnnnnnnnnnnnnnnnnnnnnnnnnnnnnnnnnnnnnnnnnnnnnnnnnnnnnnnnnnnnnnnnnnnnnnnnnnnnnnnnnnnnnnnnnnnnnnnnnnnnnnnnnnnnnnnnnnnnnnnnnnnnnnnnnnnnnnnnnnnnnnnnnnnnnnnnnnnnnnnnnnnnnnnnnnnnnnnnnnnnnnnnnnnnnnnnnnnnnnnnnnnnnnnnnnnnnnnnnnnnnnnnnnnnnnnnnnnnnnnnnnnnnnnnnnnnnnnnnnnnnnnnnnnnnnnnnnnnnnnnnnnnnnnnnnnnnnnnnnnnnnnnnnnnnnnnnnnnnnnnnnnnnnnnnnnnnnnnnnnnnnnnnnnnnnnnnnnnnnnnnnnnnnnnnnnnnnnnnnnnnnnnnnnnnnnnnnnnnnnnnnnnnnnnnnnnnnnnnnnnnnnnnnnnnnnnnnnnnnnnnnnnnnnnnnnnnnnnnnnnnnnnnnnnnnnnnnnnnnnnnnnnnnnnnnnnnnnnnnnnnnnnnnnnnnnnnnnnnnnnnnnnnnnnnnnnnnnnnnnnnnnnnnnnnnnnnnnnnnnnnnnnnnnnnnnnnnnnnnnnnnnnnnnnnnnnnnnnnnnnnnnnnnnnnnnnnnnnnnnnnnnnnnnnnnnnnnnnnnnnnnnnnnnnnnnnnnnnnnnnnnnnnnnnnnnnnnnnnnnnnnnnnnnnnnnnnnnnnnnnnnnnnnnnnnnnnnnnnnnnnnnnnnnnnnnnnnnnnnnnnnnnnnnnnnnnnnnnnnnnnnnnnnnnnnnnnnnnnnnnnnnnnnnnnnnnnnnnnnnnnnnnnnnnnnnnnnnnnnnnnnnnnnnnnnnnnnnnnnnnnnnnnnnnnnnnnnnnnnnnnnnnnnnnnnnnnnnnnnnnnnnnnnnnnnnnnnnnnnnnnnnnnnnnnnnnnnnnnnnnnnnnnnnnnnnnnnnnnnnnnnnnnnnnnnnnnnnnnnnnnnnnnnnnnnnnnnnnnnnnnnnnnnnnnnnnnnnnnnnnnnnnnnnnnnnnnnnnnnnnnnnnnnnnnnnnnnnnnnnnnnnnnnnnnnnnnnnnnnnnnnnnnnnnnnnnnnnnnnnnnnnnnnnnnnnnnnnnnnnnnnnnnnnnnnnnnnnnnnnnnnnnnnnnnnnnnnnnnnnnnnnnnnnnnnnnnnnnnnnnnnnnnnnnnnnnnnnnnnnnnnnnnnnnnnnnnnnnnnnnnnnnnnnnnnnnnnnnnnnnnnnnnnnnnnnnnnnnnnnnnnnnnnnnnnnnnnnnnnnnnnnnnnnnnnnnnnnnnnnnnnnnnnnnnnnnnnnnnnnnnnnnnnnnnnnnnnnnnnnnnnnnnnnnnnnnnnnnnnnnnnnnnnnnnnnnnnnnnnnnnnnnnnnnnnnnnnnnnnnnnnnnnnnnnnnnnnnnnnnnnnnnnnnnnnnnnnnnnnnnnnnnnnnnnnnnnnnnnnnnnnnnnnnnnnnnnnnnnnnnnnnnnnnnnnnnnnnnnnnnnnnnnnnnnnnnnnnnnnnnnnnnnnnnnnnnnnnnnnnnnnnnnnnnnnnnnnnnnnnnnnnnnnnnnnnnnnnnnnnnnnnnnnnnnnnnnnnnnnnnnnnnnnnnnnnnnnnnnnnnnnnnnnnnnnnnnnnnnnnnnnnnnnnnnnnnnnnnnnnnnnnnnnnnnnnnnnnnnnnnnnnnnnnnnnnnnnnnnnnnnnnnnnnnnnnnnnnnnnnnnnnnnnnnnnnnnnnnnnnnnnnnnnnnnnnnnnnnnnnnnnnnnnnnnnnnnnnnnnnnnnnnnnnnnnnnnnnnnnnnnnnnnnnnnnnnnnnnnnnnnnnnnnnnnnnnnnnnnnnnnnnnnnnnnnnnnnnnnnnnnnnnnnnnnnnnnnnnnnnnnnnnnnnnnnnnnnnnnnnnnnnnnnnnnnnnnnnnnnnnnnnnnnnnnnnnnnnnnnnnnnnnnnnnnnnnnnnnnnnnnnnnnnnnnnnnnnnnnnnnnnnnnnnnnnnnnnnnnnnnnnnnnnnnnnnnnnnnnnnnnnnnnnnnnnnnnnnnnnnnnnnnnnnnnnnnnnnnnnnnnnnnnnnnnnnnnnnnnnnnnnnnnnnnnnnnnnnnnnnnnnnnnnnnnnnnnnnnnnnnnnnnnnnnnnnnnnnnnnnnnnnnnnnnnnnnnnnnnnnnnnnnnnnnnnnnnnnnnnnnnnnnnnnnnnnnnnnnnnnnnnnnnnnnnnnnnnnnnnnnnnnnnnnnnnnnnnnnnnnnnnnnnnnnnnnnnnnnnnnnnnnnnnnnnnnnnnnnnnnnnnnnnnnnnnnnnnnnnnnnnnnnnnnnnnnnnnnnnnnnnnnnnnnnnnnnnnnnnnnnnnnnnnnnnnnnnnnnnnnnnnnnnnnnnnnnnnnnnnnnnnnnnnnnnnnnnnnnnnnnnnnnnnnnnnnnnnnnnnnnnnnnnnnnnnnnnnnnnnnnnnnnnnnnnnnnnnnnnnnnnnnnnnnnnnnnnnnnnnnnnnnnnnnnnnnnnnnnnnnnnnnnnnnnnnnnnnnnnnnnnnnnnnnnnnnnnnnnnnnnnnnnnnnnnnnnnnnnnnnnnnnnnnnnnnnnnnnnnnnnnnnnnnnnnnnnnnnnnnnnnnnnnnnnnnnnnnnnnnnnnnnnnnnnnnnnnnnnnnnnnnnnnnnnnnnnnnnnnnnnnnnnnnnnnnnnnnnnnnnnnnnnnnnnnnnnnnnnnnnnnnnnnnnnnnnnnnnnnnnnnnnnnnnnnnnnnnnnnnnnnnnnnnnnnnnnnnnnnnnnnnnnnnnnnnnnnnnnnnnnnnnnnnnnnnnnnnnnnnnnnnnnnnnnnnnnnnnnnnnnnnnnnnnnnnnnnnnnnnnnnnnnnnnnnnnnnnnnnnnnnnnnnnnnnnnnnnnnnnnnnnnnnnnnnnnnnnnnnnnnnnnnnnnnnnnnnnnnnnnnnnnnnnnnnnnnnnnnnnnnnnnnnnnnnnnnnnnnnnnnnnnnnnnnnnnnnnnnnnnnnnnnnnnnnnnnnnnnnnnnnnnnnnnnnnnnnnnnnnnnnnnnnnnnnnnnnnnnnnnnnnnnnnnnnnnnnnnnnnnnnnnnnnnnnnnnnnnnnnnnnnnnnnnnnnnnnnnnnnnnnnnnnnnnnnnnnnnnnnnnnnnnnnnnnnnnnnnnnnnnnnnnnnnnnnnnnnnnnnnnnnnnnnnnnnnnnnnnnnnnnnnnnnnnnnnnnnnnnnnnnnnnnnnnnnnnnnnnnnnnnnnnnnnnnnnnnnnnnnnnnnnnnnnnnnnnnnnnnnnnnnnnnnnnnnnnnnnnnnnnnnnnnnnnnnnnnnnnnnnnnnnnnnnnnnnnnnnnnnnnnnnnnnnnnnnnnnnnnnnnnnnnnnnnnnnnnnnnnnnnnnnnnnnnnnnnnnnnnnnnnnnnnnnnnnnnnnnnnnnnnnnnnnnnnnnnnnnnnnnnnnnnnnnnnnnnnnnnnnnnnnnnnnnnnnnnnnnnnnnnnnnnnnnnnnnnnnnnnnnnnnnnnnnnnnnnnnnnnnnnnnnnnnnnnnnnnnnnnnnnnnnnnnnnnnnnnnnnnnnnnnnnnnnnnnnnnnnnnnnnnnnnnnnnnnnnnnnnnnnnnnnnnnnnnnnnnnnnnnnnnnnnnnnnnnnnnnnnnnnnnnnnnnnnnnnnnnnnnnnnnnnnnnnnnnnnnnnnnnnnnnnnnnnnnnnnnnnnnnnnnnnnnnnnnnnnnnnnnnnnnnnnnnnnnnnnnnnnnnnnnnnnnnnnnnnnnnnnnnnnnnnnnnnnnnnnnnnnnnnnnnnnnnnnnnnnnnnnnnnnnnnnnnnnnnnnnnnnnnnnnnnnnnnnnnnnnnnnnnnnnnnnnnnnnnnnnnnnnnnnnnnnnnnnnnnnnnnnnnnnnnnnnnnnnnnnnnnnnnnnnnnnnnnnnnnnnnnnnnnnnnnnnnnnnnnnnnnnnnnnnnnnnnnnnnnnnnnnnnnnnnnnnnnnnnnnnnnnnnnnnnnnnnnnnnnnnnnnnnnnnnnnnnnnnnnnnnnnnnnnnnnnnnnnnnnnnnnnnnnnnnnnnnnnnnnnnnnnnnnnnnnnnnnnnnnnnnnnnnnnnnnnnnnnnnnnnnnnnnnnnnnnnnnnnnnnnnnnnnnnnnnnnnnnnnnnnnnnnnnnnnnnnnnnnnnnnnnnnnnnnnnnnnnnnnnnnnnnnnnnnnnnnnnnnnnnnnnnnnnnnnnnnnnnnnnnnnnnnnnnnnnnnnnnnnnnnnnnnnnnnnnnnnnnnnnnnnnnnnnnnnnnnnnnnnnnnnnnnnnnnnnnnnnnnnnnnnnnnnnnnnnnnnnnnnnnnnnnnnnnnnnnnnnnnnnnnnnnnnnnnnnnnnnnnnnnnnnnnnnnnnnnnnnnnnnnnnnnnnnnnnnnnnnnnnnnnnnnnnnnnnnnnnnnnnnnnnnnnnnnnnnnnnnnnnnnnnnnnnnnnnnnnnnnnnnnnnnnnnnnnnnnnnnnnnnnnnnnnnnnnnnnnnnnnnnnnnnnnnnnnnnnnnnnnnnnnnnnnnnnnnnnnnnnnnnnnnnnnnnnnnnnnnnnnnnnnnnnnnnnnnnnnnnnnnnnnnnnnnnnnnnnnnnnnnnnnnnnnnnnnnnnnnnnnnnnnnnnnnnnnnnnnnnnnnnnnnnnnnnnnnnnnnnnnnnnnnnnnnnnnnnnnnnnnnnnnnnnnnnnnnnnnnnnnnnnnnnnnnnnnnnnnnnnnnnnnnnnnnnnnnnnnnnnnnnnnnnnnnnnnnnnnnnnnnnnnnnnnnnnnnnnnnnnnnnnnnnnnnnnnnnnnnnnnnnnnnnnnnnnnnnnnnnnnnnnnnnnnnnnnnnnnnnnnnnnnnnnnnnnnnnnnnnnnnnnnnnnnnnnnnnnnnnnnnnnnnnnnnnnnnnnnnnnnnnnnnnnnnnnnnnnnnnnnnnnnnnnnnnnnnnnnnnnnnnnnnnnnnnnnnnnnnnnnnnnnnnnnnnnnnnnnnnnnnnnnnnnnnnnnnnnnnnnnnnnnnnnnnnnnnnnnnnnnnnnnnnnnnnnnnnnnnnnnnnnnnnnnnnnnnnnnnnnnnnnnnnnnnnnnnnnnnnnnnnnnnnnnnnnnnnnnnnnnnnnnnnnnnnnnnnnnnnnnnnnnnnnnnnnnnnnnnnnnnnnnnnnnnnnnnnnnnnnnnnnnnnnnnnnnnnnnnnnnnnnnnnnnnnnnnnnnnnnnnnnnnnnnnnnnnnnnnnnnnnnnnnnnnnnnnnnnnnnnnnnnnnnnnnnnnnnnnnnnnnnnnnnnnnnnnnnnnnnnnnnnnnnnnnnnnnnnnnnnnnnnnnnnnnnnnnnnnnnnnnnnnnnnnnnnnnnnnnnnnnnnnnnnnnnnnnnnnnnnnnnnnnnnnnnnnnnnnnnnnnnnnnnnnnnnnnnnnnnnnnnnnnnnnnnnnnnnnnnnnnnnnnnnnnnnnnnnnnnnnnnnnnnnnnnnnnnnnnnnnnnnnnnnnnnnnnnnnnnnnnnnnnnnnnnnnnnnnnnnnnnnnnnnnnnnnnnnnnnnnnnnnnnnnnnnnnnnnnnnnnnnnnnnnnnnnnnnnnnnnnnnnnnnnnnnnnnnnnnnnnnnnnnnnnnnnnnnnnnnnnnnnnnnnnnnnnnnnnnnnnnnnnnnnnnnnnnnnnnnnnnnnnnnnnnnnnnnnnnnnnnnnnnnnnnnnnnnnnnnnnnnnnnnnnnnnnnnnnnnnnnnnnnnnnnnnnnnnnnnnnnnnnnnnnnnnnnnnnnnnnnnnnnnnnnnnnnnnnnnnnnnnnnnnnnnnnnnnnnnnnnnnnnnnnnnnnnnnnnnnnnnnnnnnnnnnnnnnnnnnnnnnnnnnnnnnnnnnnnnnnnnnnnnnnnnnnnnnnnnnnnnnnnnnnnnnnnnnnnnnnnnnnnnnnnnnnnnnnnnnnnnnnnnnnnnnnnnnnnnnnnnnnnnnnnnnnnnnnnnnnnnnnnnnnnnnnnnnnnnnnnnnnnnnnnnnnnnnnnnnnnnnnnnnnnnnnnnnnnnnnnnnnnnnnnnnnnnnnnnnnnnnnnnnnnnnnnnnnnnnnnnnnnnnnnnnnnnnnnnnnnnnnnnnnnnnnnnnnnnnnnnnnnnnnnnnnnnnnnnnnnnnnnnnnnnnnnnnnnnnnnnnnnnnnnnnnnnnnnnnnnnnnnnnnnnnnnnnnnnnnnnnnnnnnnnnnnnnnnnnnnnnnnnnnnnnnnnnnnnnnnnnnnnnnnnnnnnnnnnnnnnnnnnnnnnnnnnnnnnnnnnnnnnnnnnnnnnnnnnnnnnnnnnnnnnnnnnnnnnnnnnnnnnnnnnnnnnnnnnnnnnnnnnnnnnnnnnnnnnnnnnnnnnnnnnnnnnnnnnnnnnnnnnnnnnnnnnnnnnnnnnnnnnnnnnnnnnnnnnnnnnnnnnnnnnnnnnnnnnnnnnnnnnnnnnnnnnnnnnnnnnnnnnnnnnnnnnnnnnnnnnnnnnnnnnnnnnnnnnnnnnnnnnnnnnnnnnnnnnnnnnnnnnnnnnnnnnnnnnnnnnnnnnnnnnnnnnnnnnnnnnnnnnnnnnnnnnnnnnnnnnnnnnnnnnnnnnnnnnnnnnnnnnnnnnnnnnnnnnnnnnnnnnnnnnnnnnnnnnnnnnnnnnnnnnnnnnnnnnnnnnnnnnnnnnnnnnnnnnnnnnnnnnnnnnnnnnnnnnnnnnnnnnnnnnnnnnnnnnnnnnnnnnnnnnnnnnnnnnnnnnnnnnnnnnnnnnnnnnnnnnnnnnnnnnnnnnnnnnnnnnnnnnnnnnnnnnnnnnnnnnnnnnnnnnnnnnnnnnnnnnnnnnnnnnnnnnnnnnnnnnnnnnnnnnnnnnnnnnnnnnnnnnnnnnnnnnnnnnnnnnnnnnnnnnnnnnnnnnnnnnnnnnnnnnnnnnnnnnnnnnnnnnnnnnnnnnnnnnnnnnnnnnnnnnnnnnnnnnnnnnnnnnnnnnnnnnnnnnnnnnnnnnnnnnnnnnnnnnnnnnnnnnnnnnnnnnnnnnnnnnnnnnnnnnnnnnnnnnnnnnnnnnnnnnnnnnnnnnnnnnnnnnnnnnnnnnnnnnnnnnnnnnnnnnnnnnnnnnnnnnnnnnnnnnnnnnnnnnnnnnnnnnnnnnnnnnnnnnnnnnnnnnnnnnnnnnnnnnnnnnnnnnnnnnnnnnnnnnnnnnnnnnnnnnnnnnnnnnnnnnnnnnnnnnnnnnnnnnnnnnnnnnnnnnnnnnnnnnnnnnnnnnnnnnnnnnnnnnnnnnnnnnnnnnnnnnnnnnnnnnnnnnnnnnnnnnnnnnnnnnnnnnnnnnnnnnnnnnnnnnnnnnnnnnnnnnnnnnnnnnnnnnnnnnnnnnnnnnnnnnnnnnnnnnnnnnnnnnnnnnnnnnnnnnnnnnnnnnnnnnnnnnnnnnnnnnnnnnnnnnnnnnnnnnnnnnnnnnnnnnnnnnnnnnnnnnnnnnnnnnnnnnnnnnnnnnnnnnnnnnnnnnnnnnnnnnnnnnnnnnnnnnnnnnnnnnnnnnnnnnnnnnnnnnnnnnnnnnnnnnnnnnnnnnnnnnnnnnnnnnnnnnnnnnnnnnnnnnnnnnnnnnnnnnnnnnnnnnnnnnnnnnnnnnnnnnnnnnnnnnnnnnnnnnnnnnnnnnnnnnnnnnnnnnnnnnnnnnnnnnnnnnnnnnnnnnnnnnnnnnnnnnnnnnnnnnnnnnnnnnnnnnnnnnnnnnnnnnnnnnnnnnnnnnnnnnnnnnnnnnnnnnnnnnnnnnnnnnnnnnnnnnnnnnnnnnnnnnnnnnnnnnnnnnnnnnnnnnnnnnnnnnnnnnnnnnnnnnnnnnnnnnnnnnnnnnnnnnnnnnnnnnnnnnnnnnnnnnnnnnnnnnnnnnnnnnnnnnnnnnnnnnnnnnnnnnnnnnnnnnnnnnnnnnnnnnnnnnnnnnnnnnnnnnnnnnnnnnnnnnnnnnnnnnnnnnnnnnnnnnnnnnnnnnnnnnnnnnnnnnnnnnnnnnnnnnnnnnnnnnnnnnnnnnnnnnnnnnnnnnnnnnnnnnnnnnnnnnnnnnnnnnnnnnnnnnnnnnnnnnnnnnnnnnnnnnnnnnnnnnnnnnnnnnnnnnnnnnnnnnnnnnnnnnnnnnnnnnnnnnnnnnnnnnnnnnnnnnnnnnnnnnnnnnnnnnnnnnnnnnnnnnnnnnnnnnnnnnnnnnnnnnnnnnnnnnnnnnnnnnnnnnnnnnnnnnnnnnnnnnnnnnnnnnnnnnnnnnnnnnnnnnnnnnnnnnnnnnnnnnnnnnnnnnnnnnnnnnnnnnnnnnnnnnnnnnnnnnnnnnnnnnnnnnnnnnnnnnnnnnnnnnnnnnnnnnnnnnnnnnnnnnnnnnnnnnnnnnnnnnnnnnnnnnnnnnnnnnnnnnnnnnnnnnnnnnnnnnnnnnnnnnnnnnnnnnnnnnnnnnnnnnnnnnnnnnnnnnnnnnnnnnnnnnnnnnnnnnnnnnnnnnnnnnnnnnnnnnnnnnnnnnnnnnnnnnnnnnnnnnnnnnnnnnnnnnnnnnnnnnnnnnnnnnnnnnnnnnnnnnnnnnnnnnnnnnnnnnnnnnnnnnnnnnnnnnnnnnnnnnnnnnnnnnnnnnnnnnnnnnnnnnnnnnnnnnnnnnnnnnnnnnnnnnnnnnnnnnnnnnnnnnnnnnnnnnnnnnnnnnnnnnnnnnnnnnnnnnnnnnnnnnnnnnnnnnnnnnnnnnnnnnnnnnnnnnnnnnnnnnnnnnnnnnnnnnnnnnnnnnnnnnnnnnnnnnnnnnnnnnnnnnnnnnnnnnnnnnnnnnnnnnnnnnnnnnnnnnnnnnnnnnnnnnnnnnnnnnnnnnnnnnnnnnnnnnnnnnnnnnnnnnnnnnnnnnnnnnnnnnnnnnnnnnnnnnnnnnnnnnnnnnnnnnnnnnnnnnnnnnnnnnnnnnnnnnnnnnnnnnnnnnnnnnnnnnnnnnnnnnnnnnnnnnnnnnnnnnnnnnnnnnnnnnnnnnnnnnnnnnnnnnnnnnnnnnnnnnnnnnnnnnnnnnnnnnnnnnnnnnnnnnnnnnnnnnnnnnnnnnnnnnnnnnnnnnnnnnnnnnnnnnnnnnnnnnnnnnnnnnnnnnnnnnnnnnnnnnnnnnnnnnnnnnnnnnnnnnnnnnnnnnnnnnnnnnnnnnnnnnnnnnnnnnnnnnnnnnnnnnnnnnnnnnnnnnnnnnnnnnnnnnnnnnnnnnnnnnnnnnnnnnnnnnnnnnnnnnnnnnnnnnnnnnnnnnnnnnnnnnnnnnnnnnnnnnnnnnnnnnnnnnnnnnnnnnnnnnnnnnnnnnnnnnnnnnnnnnnnnnnnnnnnnnnnnnnnnnnnnnnnnnnnnnnnnnnnnnnnnnnnnnnnnnnnnnnnnnnnnnnnnnnnnnnnnnnnnnnnnnnnnnnnnnnnnnnnnnnnnnnnnnnnnnnnnnnnnnnnnnnnnnnnnnnnnnnnnnnnnnnnnnnnnnnnnnnnnnnnnnnnnnnnnnnnnnnnnnnnnnnnnnnnnnnnnnnnnnnnnnnnnnnnnnnnnnnnnnnnnnnnnnnnnnnnnnnnnnnnnnnnnnnnnnnnnnnnnnnnnnnnnnnnnnnnnnnnnnnnnnnnnnnnnnnnnnnnnnnnnnnnnnnnnnnnnnnnnnnnnnnnnnnnnnnnnnnnnnnnnnnnnnnnnnnnnnnnnnnnnnnnnnnnnnnnnnnnnnnnnnnnnnnnnnnnnnnnnnnnnnnnnnnnnnnnnnnnnnnnnnnnnnnnnnnnnnnnnnnnnnnnnnnnnnnnnnnnnnnnnnnnnnnnnnnnnnnnnnnnnnnnnnnnnnnnnnnnnnnnnnnnnnnnnnnnnnnnnnnnnnnnnnnnnnnnnnnnnnnnnnnnnnnnnnnnnnnnnnnnnnnnnnnnnnnnnnnnnnnnnnnnnnnnnnnnnnnnnnnnnnnnnnnnnnnnnnnnnnnnnnnnnnnnnnnnnnnnnnnnnnnnnnnnnnnnnnnnnnnnnnnnnnnnnnnnnnnnnnnnnnnnnnnnnnnnnnnnnnnnnnnnnnnnnnnnnnnnnnnnnnnnnnnnnnnnnnnnnnnnnnnnnnnnnnnnnnnnnnnnnnnnnnnnnnnnnnnnnnnnnnnnnnnnnnnnnnnnnnnnnnnnnnnnnnnnnnnnnnnnnnnnnnnnnnnnnnnnnnnnnnnnnnnnnnnnnnnnnnnnnnnnnnnnnnnnnnnnnnnnnnnnnnnnnnnnnnnnnnnnnnnnnnnnnnnnnnnnnnnnnnnnnnnnnnnnnnnnnnnnnnnnnnnnnnnnnnnnnnnnnnnnnnnnnnnnnnnnnnnnnnnnnnnnnnnnnnnnnnnnnnnnnnnnnnnnnnnnnnnnnnnnnnnnnnnnnnnnnnnnnnnnnnnnnnnnnnnnnnnnnnnnnnnnnnnnnnnnnnnnnnnnnnnnnnnnnnnnnnnnnnnnnnnnnnnnnnnnnnnnnnnnnnnnnnnnnnnnnnnnnnnnnnnnnnnnnnnnnnnnnnnnnnnnnnnnnnnnnnnnnnnnnnnnnnnnnnnnnnnnnnnnnnnnnnnnnnnnnnnnnnnnnnnnnnnnnnnnnnnnnnnnnnnnnnnnnnnnnnnnnnnnnnnnnnnnnnnnnnnnnnnnnnnnnnnnnnnnnnnnnnnnnnnnnnnnnnnnnnnnnnnnnnnnnnnnnnnnnnnnnnnnnnnnnnnnnnnnnnnnnnnnnnnnnnnnnnnnnnnnnnnnnnnnnnnnnnnnnnnnnnnnnnnnnnnnnnnnnnnnnnnnnnnnnnnnnnnnnnnnnnnnnnnnnnnnnnnnnnnnnnnnnnnnnnnnnnnnnnnnnnnnnnnnnnnnnnnnnnnnnnnnnnnnnnnnnnnnnnnnnnnnnnnnnnnnnnnnnnnnnnnnnnnnnnnnnnnnnnnnnnnnnnnnnnnnnnnnnnnnnnnnnnnnnnnnnnnnnnnnnnnnnnnnnnnnnnnnnnnnnnnnnnnnnnnnnnnnnnnnnnnnnnnnnnnnnnnnnnnnnnnnnnnnnnnnnnnnnnnnnnnnnnnnnnnnnnnnnnnnnnnnnnnnnnnnnnnnnnnnnnnnnnnnnnnnnnnnnnnnnnnnnnnnnnnnnnnnnnnnnnnnnnnnnnnnnnnnnnnnnnnnnnnnnnnnnnnnnnnnnnnnnnnnnnnnnnnnnnnnnnnnnnnnnnnnnnnnnnnnnnnnnnnnnnnnnnnnnnnnnnnnnnnnnnnnnnnnnnnnnnnnnnnnnnnnnnnnnnnnnnnnnnnnnnnnnnnnnnnnnnnnnnnnnnnnnnnnnnnnnnnnnnnnnnnnnnnnnnnnnnnnnnnnnnnnnnnnnnnnnnnnnnnnnnnnnnnnnnnnnnnnnnnnnnnnnnnnnnnnnnnnnnnnnnnnnnnnnnnnnnnnnnnnnnnnnnnnnnnnnnnnnnnnnnnnnnnnnnnnnnnnnnnnnnnnnnnnnnnnnnnnnnnnnnnnnnnnnnnnnnnnnnnnnnnnnnnnnnnnnnnnnnnnnnnnnnnnnnnnnnnnnnnnnnnnnnnnnnnnnnnnnnnnnnnnnnnnnnnnnnnnnnnnnnnnnnnnnnnnnnnnnnnnnnnnnnnnnnnnnnnnnnnnnnnnnnnnnnnnnnnnnnnnnnnnnnnnnnnnnnnnnnnnnnnnnnnnnnnnnnnnnnnnnnnnnnnnnnnnnnnnnnnnnnnnnnnnnnnnnnnnnnnnnnnnnnnnnnnnnnnnnnnnnnnnnnnnnnnnnnnnnnnnnnnnnnnnnnnnnnnnnnnnnnnnnnnnnnnnnnnnnnnnnnnnnnnnnnnnnnnnnnnnnnnnnnnnnnnnnnnnnnnnnnnnnnnnnnnnnnnnnnnnnnnnnnnnnnnnnnnnnnnnnnnnnnnnnnnnnnnnnnnnnnnnnnnnnnnnnnnnnnnnnnnnnnnnnnnnnnnnnnnnnnnnnnnnnnnnnnnnnnnnnnnnnnnnnnnnnnnnnnnnnnnnnnnnnnnnnnnnnnnnnnnnnnnnnnnnnnnnnnnnnnnnnnnnnnnnnnnnnnnnnnnnnnnnnnnnnnnnnnnnnnnnnnnnnnnnnnnnnnnnnnnnnnnnnnnnnnnnnnnnnnnnnnnnnnnnnnnnnnnnnnnnnnnnnnnnnnnnnnnnnnnnnnnnnnnnnnnnnnnnnnnnnnnnnnnnnnnnnnnnnnnnnnnnnnnnnnnnnnnnnnnnnnnnnnnnnnnnnnnnnnnnnnnnnnnnnnnnnnnnnnnnnnnnnnnnnnnnnnnnnnnnnnnnnnnnnnnnnnnnnnnnnnnnnnnnnnnnnnnnnnnnnnnnnnnnnnnnnnnnnnnnnnnnnnnnnnnnnnnnnnnnnnnnnnnnnnnnnnnnnnnnnnnnnnnnnnnnnnnnnnnnnnnnnnnnnnnnnnnnnnnnnnnnnnnnnnnnnnnnnnnnnnnnnnnnnnnnnnnnnnnnnnnnnnnnnnnnnnnnnnnnnnnnnnnnnnnnnnnnnnnnnnnnnnnnnnnnnnnnnnnnnnnnnnnnnnnnnnnnnnnnnnnnnnnnnnnnnnnnnnnnnnnnnnnnnnnnnnnnnnnnnnnnnnnnnnnnnnnnnnnnnnnnnnnnnnnnnnnnnnnnnnnnnnnnnnnnnnnnnnnnnnnnnnnnnnnnnnnnnnnnnnnnnnnnnnnnnnnnnnnnnnnnnnnnnnnnnnnnnnnnnnnnnnnnnnnnnnnnnnnnnnnnnnnnnnnnnnnnnnnnnnnnnnnnnnnnnnnnnnnnnnnnnnnnnnnnnnnnnnnnnnnnnnnnnnnnnnnnnnnnnnnnnnnnnnnnnnnnnnnnnnnnnnnnnnnnnnnnnnnnnnnnnnnnnnnnnnnnnnnnnnnnnnnnnnnnnnnnnnnnnnnnnnnnnnnnnnnnnnnnnnnnnnnnnnnnnnnnnnnnnnnnnnnnnnnnnnnnnnnnnnnnnnnnnnnnnnnnnnnnnnnnnnnnnnnnnnnnnnnnnnnnnnnnnnnnnnnnnnnnnnnnnnnnnnnnnnnnnnnnnnnnnnnnnnnnnnnnnnnnnnnnnnnnnnnnnnnnnnnnnnnnnnnnnnnnnnnnnnnnnnnnnnnnnnnnnnnnnnnnnnnnnnnnnnnnnnnnnnnnnnnnnnnnnnnnnnnnnnnnnnnnnnnnnnnnnnnnnnnnnnnnnnnnnnnnnnnnnnnnnnnnnnnnnnnnnnnnnnnnnnnnnnnnnnnnnnnnnnnnnnnnnnnnnnnnnnnnnnnnnnnnnnnnnnnnnnnnnnnnnnnnnnnnnnnnnnnnnnnnnnnnnnnnnnnnnnnnnnnnnnnnnnnnnnnnnnnnnnnnnnnnnnnnnnnnnnnnnnnnnnnnnnnnnnnnnnnnnnnnnnnnnnnnnnnnnnnnnnnnnnnnnnnnnnnnnnnnnnnnnnnnnnnnnnnnnnnnnnnnnnnnnnnnnnnnnnnnnnnnnnnnnnnnnnnnnnnnnnnnnnnnnnnnnnnnnnnnnnnnnnnnnnnnnnnnnnnnnnnnnnnnnnnnnnnnnnnnnnnnnnnnnnnnnnnnnnnnnnnnnnnnnnnnnnnnnnnnnnnnnnnnnnnnnnnnnnnnnnnnnnnnnnnnnnnnnnnnnnnnnnnnnnnnnnnnnnnnnnnnnnnnnnnnnnnnnnnnnnnnnnnnnnnnnnnnnnnnnnnnnnnnnnnnnnnnnnnnnnnnnnnnnnnnnnnnnnnnnnnnnnnnnnnnnnnnnnnnnnnnnnnnnnnnnnnnnnnnnnnnnnnnnnnnnnnnnnnnnnnnnnnnnnnnnnnnnnnnnnnnnnnnnnnnnnnnnnnnnnnnnnnnnnnnnnnnnnnnnnnnnnnnnnnnnnnnnnnnnnnnnnnnnnnnnnnnnnnnnnnnnnnnnnnnnnnnnnnnnnnnnnnnnnnnnnnnnnnnnnnnnnnnnnnnnnnnnnnnnnnnnnnnnnnnnnnnnnnnnnnnnnnnnnnnnnnnnnnnnnnnnnnnnnnnnnnnnnnnnnnnnnnnnnnnnnnnnnnnnnnnnnnnnnnnnnnnnnnnnnnnnnnnnnnnnnnnnnnnnnnnnnnnnnnnnnnnnnnnnnnnnnnnnnnnnnnnnnnnnnnnnnnnnnnnnnnnnnnnnnnnnnnnnnnnnnnnnnnnnnnnnnnnnnnnnnnnnnnnnnnnnnnnnnnnnnnnnnnnnnnnnnnnnnnnnnnnnnnnnnnnnnnnnnnnnnnnnnnnnnnnnnnnnnnnnnnnnnnnnnnnnnnnnnnnnnnnnnnnnnnnnnnnnnnnnnnnnnnnnnnnnnnnnnnnnnnnnnnnnnnnnnnnnnnnnnnnnnnnnnnnnnnnnnnnnnnnnnnnnnnnnnnnnnnnnnnnnnnnnnnnnnnnnnnnnnnnnnnnnnnnnnnnnnnnnnnnnnnnnnnnnnnnnnnnnnnnnnnnnnnnnnnnnnnnnnnnnnnnnnnnnnnnnnnnnnnnnnnnnnnnnnnnnnnnnnnnnnnnnnnnnnnnnnnnnnnnnnnnnnnnnnnnnnnnnnnnnnnnnnnnnnnnnnnnnnnnnnnnnnnnnnnnnnnnnnnnnnnnnnnnnnnnnnnnnnnnnnnnnnnnnnnnnnnnnnnnnnnnnnnnnnnnnnnnnnnnnnnnnnnnnnnnnnnnnnnnnnnnnnnnnnnnnnnnnnnnnnnnnnnnnnnnnnnnnnnnnnnnnnnnnnnnnnnnnnnnnnnnnnnnnnnnnnnnnnnnnnnnnnnnnnnnnnnnnnnnnnnnnnnnnnnnnnnnnnnnnnnnnnnnnnnnnnnnnnnnnnnnnnnnnnnnnnnnnnnnnnnnnnnnnnnnnnnnnnnnnnnnnnnnnnnnnnnnnnnnnnnnnnnnnnnnnnnnnnnnnnnnnnnnnnnnnnnnnnnnnnnnnnnnnnnnnnnnnnnnnnnnnnnnnnnnnnnnnnnnnnnnnnnnnnnnnnnnnnnnnnnnnnnnnnnnnnnnnnnnnnnnnnnnnnnnnnnnnnnnnnnnnnnnnnnnnnnnnnnnnnnnnnnnnnnnnnnnnnnnnnnnnnnnnnnnnnnnnnnnnnnnnnnnnnnnnnnnnnnnnnnnnnnnnnnnnnnnnnnnnnnnnnnnnnnnnnnnnnnnnnnnnnnnnnnnnnnnnnnnnnnnnnnnnnnnnnnnnnnnnnnnnnnnnnnnnnnnnnnnnnnnnnnnnnnnnnnnnnnnnnnnnnnnnnnnnnnnnnnnnnnnnnnnnnnnnnnnnnnnnnnnnnnnnnnnnnnnnnnnnnnnnnnnnnnnnnnnnnnnnnnnnnnnnnnnnnnnnnnnnnnnnnnnnnnnnnnnnnnnnnnnnnnnnnnnnnnnnnnnnnnnnnnnnnnnnnnnnnnnnnnnnnnnnnnnnnnnnnnnnnnnnnnnnnnnnnnnnnnnnnnnnnnnnnnnnnnnnnnnnnnnnnnnnnnnnnnnnnnnnnnnnnnnnnnnnnnnnnnnnnnnnnnnnnnnnnnnnnnnnnnnnnnnnnnnnnnnnnnnnnnnnnnnnnnnnnnnnnnnnnnnnnnnnnnnnnnnnnnnnnnnnnnnnnnnnnnnnnnnnnnnnnnnnnnnnnnnnnnnnnnnnnnnnnnnnnnnnnnnnnnnnnnnnnnnnnnnnnnnnnnnnnnnnnnnnnnnnnnnnnnnnnnnnnnnnnnnnnnnnnnnnnnnnnnnnnnnnnnnnnnnnnnnnnnnnnnnnnnnnnnnnnnnnnnnnnnnnnnnnnnnnnnnnnnnnnnnnnnnnnnnnnnnnnnnnnnnnnnnnnnnnnnnnnnnnnnnnnnnnnnnnnnnnnnnnnnnnnnnnnnnnnnnnnnnnnnnnnnnnnnnnnnnnnnnnnnnnnnnnnnnnnnnnnnnnnnnnnnnnnnnnnnnnnnnnnnnnnnnnnnnnnnnnnnnnnnnnnnnnnnnnnnnnnnnnnnnnnnnnnnnnnnnnnnnnnnnnnnnnnnnnnnnnnnnnnnnnnnnnnnnnnnnnnnnnnnnnnnnnnnnnnnnnnnnnnnnnnnnnnnnnnnnnnnnnnnnnnnnnnnnnnnnnnnnnnnnnnnnnnnnnnnnnnnnnnnnnnnnnnnnnnnnnnnnnnnnnnnnnnnnnnnnnnnnnnnnnnnnnnnnnnnnnnnnnnnnnnnnnnnnnnnnnnnnnnnnnnnnnnnnnnnnnnnnnnnnnnnnnnnnnnnnnnnnnnnnnnnnnnnnnnnnnnnnnnnnnnnnnnnnnnnnnnnnnnnnnnnnnnnnnnnnnnnnnnnnnnnnnnnnnnnnnnnnnnnnnnnnnnnnnnnnnnnnnnnnnnnnnnnnnnnnnnnnnnnnnnnnnnnnnnnnnnnnnnnnnnnnnnnnnnnnnnnnnnnnnnnnnnnnnnnnnnnnnnnnnnnnnnnnnnnnnnnnnnnnnnnnnnnnnnnnnnnnnnnnnnnnnnnnnnnnnnnnnnnnnnnnnnnnnnnnnnnnnnnnnnnnnnnnnnnnnnnnnnnnnnnnnnnnnnnnnnnnnnnnnnnnnnnnnnnnnnnnnnnnnnnnnnnnnnnnnnnnnnnnnnnnnnnnnnnnnnnnnnnnnnnnnnnnnnnnnnnnnnnnnnnnnnnnnnnnnnnnnnnnnnnnnnnnnnnnnnnnnnnnnnnnnnnnnnnnnnnnnnnnnnnnnnnnnnnnnnnnnnnnnnnnnnnnnnnnnnnnnnnnnnnnnnnnnnnnnnnnnnnnnnnnnnnnnnnnnnnnnnnnnnnnnnnnnnnnnnnnnnnnnnnnnnnnnnnnnnnnnnnnnnnnnnnnnnnnnnnnnnnnnnnnnnnnnnnnnnnnnnnnnnnnnnnnnnnnnnnnnnnnnnnnnnnnnnnnnnnnnnnnnnnnnnnnnnnnnnnnnnnnnnnnnnnnnnnnnnnnnnnnnnnnnnnnnnnnnnnnnnnnnnnnnnnnnnnnnnnnnnnnnnnnnnnnnnnnnnnnnnnnnnnnnnnnnnnnnnnnnnnnnnnnnnnnnnnnnnnnnnnnnnnnnnnnnnnnnnnnnnnnnnnnnnnnnnnnnnnnnnnnnnnnnnnnnnnnnnnnnnnnnnnnnnnnnnnnnnnnnnnnnnnnnnnnnnnnnnnnnnnnnnnnnnnnnnnnnnnnnnnnnnnnnnnnnnnnnnnnnnnnnnnnnnnnnnnnnnnnnnnnnnnnnnnnnnnnnnnnnnnnnnnnnnnnnnnnnnnnnnnnnnnnnnnnnnnnnnnnnnnnnnnnnnnnnnnnnnnnnnnnnnnnnnnnnnnnnnnnnnnnnnnnnnnnnnnnnnnnnnnnnnnnnnnnnnnnnnnnnnnnnnnnnnnnnnnnnnnnnnnnnnnnnnnnnnnnnnnnnnnnnnnnnnnnnnnnnnnnnnnnnnnnnnnnnnnnnnnnnnnnnnnnnnnnnnnnnnnnnnnnnnnnnnnnnnnnnnnnnnnnnnnnnnnnnnnnnnnnnnnnnnnnnnnnnnnnnnnnnnnnnnnnnnnnnnnnnnnnnnnnnnnnnnnnnnnnnnnnnnnnnnnnnnnnnnnnnnnnnnnnnnnnnnnnnnnnnnnnnnnnnnnnnnnnnnnnnnnnnnnnnnnnnnnnnnnnnnnnnnnnnnnnnnnnnnnnnnnnnnnnnnnnnnnnnnnnnnnnnnnnnnnnnnnnnnnnnnnnnnnnnnnnnnnnnnnnnnnnnnnnnnnnnnnnnnnnnnnnnnnnnnnnnnnnnnnnnnnnnnnnnnnnnnnnnnnnnnnnnnnnnnnnnnnnnnnnnnnnnnnnnnnnnnnnnnnnnnnnnnnnnnnnnnnnnnnnnnnnnnnnnnnnnnnnnnnnnnnnnnnnnnnnnnnnnnnnnnnnnnnnnnnnnnnnnnnnnnnnnnnnnnnnnnnnnnnnnnnnnnnnnnnnnnnnnnnnnnnnnnnnnnnnnnnnnnnnnnnnnnnnnnnnnnnnnnnnnnnnnnnnnnnnnnnnnnnnnnnnnnnnnnnnnnnnnnnnnnnnnnnnnnnnnnnnnnnnnnnnnnnnnnnnnnnnnnnnnnnnnnnnnnnnnnnnnnnnnnnnnnnnnnnnnnnnnnnnnnnnnnnnnnnnnnnnnnnnnnnnnnnnnnnnnnnnnnnnnnnnnnnnnnnnnnnnnnnnnnnnnnnnnnnnnnnnnnnnnnnnnnnnnnnnnnnnnnnnnnnnnnnnnnnnnnnnnnnnnnnnnnnnnnnnnnnnnnnnnnnnnnnnnnnnnnnnnnnnnnnnnnnnnnnnnnnnnnnnnnnnnnnnnnnnnnnnnnnnnnnnnnnnnnnnnnnnnnnnnnnnnnnnnnnnnnnnnnnnnnnnnnnnnnnnnnnnnnnnnnnnnnnnnnnnnnnnnnnnnnnnnnnnnnnnnnnnnnnnnnnnnnnnnnnnnnnnnnnnnnnnnnnnnnnnnnnnnnnnnnnnnnnnnnnnnnnnnnnnnnnnnnnnnnnnnnnnnnnnnnnnnnnnnnnnnnnnnnnnnnnnnnnnnnnnnnnnnnnnnnnnnnnnnnnnnnnnnnnnnnnnnnnnnnnnnnnnnnnnnnnnnnnnnnnnnnnnnnnnnnnnnnnnnnnnnnnnnnnnnnnnnnnnnnnnnnnnnnnnnnnnnnnnnnnnnnnnnnnnnnnnnnnnnnnnnnnnnnnnnnnnnnnnnnnnnnnnnnnnnnnnnnnnnnnnnnnnnnnnnnnnnnnnnnnnnnnnnnnnnnnnnnnnnnnnnnnnnnnnnnnnnnnnnnnnnnnnnnnnnnnnnnnnnnnnnnnnnnnnnnnnnnnnnnnnnnnnnnnnnnnnnnnnnnnnnnnnnnnnnnnnnnnnnnnnnnnnnnnnnnnnnnnnnnnnnnnnnnnnnnnnnnnnnnnnnnnnnnnnnnnnnnnnnnnnnnnnnnnnnnnnnnnnnnnnnnnnnnnnnnnnnnnnnnnnnnnnnnnnnnnnnnnnnnnnnnnnnnnnnnnnnnnnnnnnnnnnnnnnnnnnnnnnnnnnnnnnnnnnnnnnnnnnnnnnnnnnnnnnnnnnnnnnnnnnnnnnnnnnnnnnnnnnnnnnnnnnnnnnnnnnnnnnnnnnnnnnnnnnnnnnnnnnnnnnnnnnnnnnnnnnnnnnnnnnnnnnnnnnnnnnnnnnnnnnnnnnnnnnnnnnnnnnnnnnnnnnnnnnnnnnnnnnnnnnnnnnnnnnnnnnnnnnnnnnnnnnnnnnnnnnnnnnnnnnnnnnnnnnnnnnnnnnnnnnnnnnnnnnnnnnnnnnnnnnnnnnnnnnnnnnnnnnnnnnnnnnnnnnnnnnnnnnnnnnnnnnnnnnnnnnnnnnnnnnnnnnnnnnnnnnnnnnnnnnnnnnnnnnnnnnnnnnnnnnnnnnnnnnnnnnnnnnnnnnnnnnnnnnnnnnnnnnnnnnnnnnnnnnnnnnnnnnnnnnnnnnnnnnnnnnnnnnnnnnnnnnnnnnnnnnnnnnnnnnnnnnnnnnnnnnnnnnnnnnnnnnnnnnnnnnnnnnnnnnnnnnnnnnnnnnnnnnnnnnnnnnnnnnnnnnnnnnnnnnnnnnnnnnnnnnnnnnnnnnnnnnnnnnnnnnnnnnnnnnnnnnnnnnnnnnnnnnnnnnnnnnnnnnnnnnnnnnnnnnnnnnnnnnnnnnnnnnnnnnnnnnnnnnnnnnnnnnnnnnnnnnnnnnnnnnnnnnnnnnnnnnnnnnnnnnnnnnnnnnnnnnnnnnnnnnnnnnnnnnnnnnnnnnnnnnnnnnnnnnnnnnnnnnnnnnnnnnnnnnnnnnnnnnnnnnnnnnnnnnnnnnnnnnnnnnnnnnnnnnnnnnnnnnnnnnnnnnnnnnnnnnnnnnnnnnnnnnnnnnnnnnnnnnnnnnnnnnnnnnnnnnnnnnnnnnnnnnnnnnnnnnnnnnnnnnnnnnnnnnnnnnnnnnnnnnnnnnnnnnnnnnnnnnnnnnnnnnnnnnnnnnnnnnnnnnnnnnnnnnnnnnnnnnnnnnnnnnnnnnnnnnnnnnnnnnnnnnnnnnnnnnnnnnnnnnnnnnnnnnnnnnnnnnnnnnnnnnnnnnnnnnnnnnnnnnnnnnnnnnnnnnnnnnnnnnnnnnnnnnnnnnnnnnnnnnnnnnnnnnnnnnnnnnnnnnnnnnnnnnnnnnnnnnnnnnnnnnnnnnnnnnnnnnnnnnnnnnnnnnnnnnnnnnnnnnnnnnnnnnnnnnnnnnnnnnnnnnnnnnnnnnnnnnnnnnnnnnnnnnnnnnnnnnnnnnnnnnnnnnnnnnnnnnnnnnnnnnnnnnnnnnnnnnnnnnnnnnnnnnnnnnnnnnnnnnnnnnnnnnnnnnnnnnnnnnnnnnnnnnnnnnnnnnnnnnnnnnnnnnnnnnnnnnnnnnnnnnnnnnnnnnnnnnnnnnnnnnnnnnnnnnnnnnnnnnnnnnnnnnnnnnnnnnnnnnnnnnnnnnnnnnnnnnnnnnnnnnnnnnnnnnnnnnnnnnnnnnnnnnnnnnnnnnnnnnnnnnnnnnnnnnnnnnnnnnnnnnnnnnnnnnnnnnnnnnnnnnnnnnnnnnnnnnnnnnnnnnnnnnnnnnnnnnnnnnnnnnnnnnnnnnnnnnnnnnnnnnnnnnnnnnnnnnnnnnnnnnnnnnnnnnnnnnnnnnnnnnnnnnnnnnnnnnnnnnnnnnnnnnnnnnnnnnnnnnnnnnnnnnnnnnnnnnnnnnnnnnnnnnnnnnnnnnnnnnnnnnnnnnnnnnnnnnnnnnnnnnnnnnnnnnnnnnnnnnnnnnnnnnnnnnnnnnnnnnnnnnnnnnnnnnnnnnnnnnnnnnnnnnnnnnnnnnnnnnnnnnnnnnnnnnnnnnnnnnnnnnnnnnnnnnnnnnnnnnnnnnnnnnnnnnnnnnnnnnnnnnnnnnnnnnnnnnnnnnnnnnnnnnnnnnnnnnnnnnnnnnnnnnnnnnnnnnnnnnnnnnnnnnnnnnnnnnnnnnnnnnnnnnnnnnnnnnnnnnnnnnnnnnnnnnnnnnnnnnnnnnnnnnnnnnnnnnnnnnnnnnnnnnnnnnnnnnnnnnnnnnnnnnnnnnnnnnnnnnnnnnnnnnnnnnnnnnnnnnnnnnnnnnnnnnnnnnnnnnnnnnnnnnnnnnnnnnnnnnnnnnnnnnnnnnnnnnnnnnnnnnnnnnnnnnnnnnnnnnnnnnnnnnnnnnnnnnnnnnnnnnnnnnnnnnnnnnnnnnnnnnnnnnnnnnnnnnnnnnnnnnnnnnnnnnnnnnnnnnnnnnnnnnnnnnnnnnnnnnnnnnnnnnnnnnnnnnnnnnnnnnnnnnnnnnnnnnnnnnnnnnnnnnnnnnnnnnnnnnnnnnnnnnnnnnnnnnnnnnnnnnnnnnnnnnnnnnnnnnnnnnnnnnnnnnnnnnnnnnnnnnnnnnnnnnnnnnnnnnnnnnnnnnnnnnnnnnnnnnnnnnnnnnnnnnnnnnnnnnnnnnnnnnnnnnnnnnnnnnnnnnnnnnnnnnnnnnnnnnnnnnnnnnnnnnnnnnnnnnnnnnnnnnnnnnnnnnnnnnnnnnnnnnnnnnnnnnnnnnnnnnnnnnnnnnnnnnnnnnnnnnnnnnnnnnnnnnnnnnnnnnnnnnnnnnnnnnnnnnnnnnnnnnnnnnnnnnnnnnnnnnnnnnnnnnnnnnnnnnnnnnnnnnnnnnnnnnnnnnnnnnnnnnnnnnnnnnnnnnnnnnnnnnnnnnnnnnnnnnnnnnnnnnnnnnnnnnnnnnnnnnnnnnnnnnnnnnnnnnnnnnnnnnnnnnnnnnnnnnnnnnnnnnnnnnnnnnnnnnnnnnnnnnnnnnnnnnnnnnnnnnnnnnnnnnnnnnnnnnnnnnnnnnnnnnnnnnnnnnnnnnnnnnnnnnnnnnnnnnnnnnnnnnnnnnnnnnnnnnnnnnnnnnnnnnnnnnnnnnnnnnnnnnnnnnnnnnnnnnnnnnnnnnnnnnnnnnnnnnnnnnnnnnnnnnnnnnnnnnnnnnnnnnnnnnnnnnnnnnnnnnnnnnnnnnnnnnnnnnnnnnnnnnnnnnnnnnnnnnnnnnnnnnnnnnnnnnnnnnnnnnnnnnnnnnnnnnnnnnnnnnnnnnnnnnnnnnnnnnnnnnnnnnnnnnnnnnnnnnnnnnnnnnnnnnnnnnnnnnnnnnnnnnnnnnnnnnnnnnnnnnnnnnnnnnnnnnnnnnnnnnnnnnnnnnnnnnnnnnnnnnnnnnnnnnnnnnnnnnnnnnnnnnnnnnnnnnnnnnnnnnnnnnnnnnnnnnnnnnnnnnnnnnnnnnnnnnnnnnnnnnnnnnnnnnnnnnnnnnnnnnnnnnnnnnnnnnnnnnnnnnnnnnnnnnnnnnnnnnnnnnnnnnnnnnnnnnnnnnnnnnnnnnnnnnnnnnnnnnnnnnnnnnnnnnnnnnnnnnnnnnnnnnnnnnnnnnnnnnnnnnnnnnnnnnnnnnnnnnnnnnnnnnnnnnnnnnnnnnnnnnnnnnnnnnnnnnnnnnnnnnnnnnnnnnnnnnnnnnnnnnnnnnnnnnnnnnnnnnnnnnnnnnnnnnnnnnnnnnnnnnnnnnnnnnnnnnnnnnnnnnnnnnnnnnnnnnnnnnnnnnnnnnnnnnnnnnnnnnnnnnnnnnnnnnnnnnnnnnnnnnnnnnnnnnnnnnnnnnnnnnnnnnnnnnnnnnnnnnnnnnnnnnnnnnnnnnnnnnnnnnnnnnnnnnnnnnnnnnnnnnnnnnnnnnnnnnnnnnnnnnnnnnnnnnnnnnnnnnnnnnnnnnnnnnnnnnnnnnnnnnnnnnnnnnnnnnnnnnnnnnnnnnnnnnnnnnnnnnnnnnnnnnnnnnnnnnnnnnnnnnnnnnnnnnnnnnnnnnnnnnnnnnnnnnnnnnnnnnnnnnnnnnnnnnnnnnnnnnnnnnnnnnnnnnnnnnnnnnnnnnnnnnnnnnnnnnnnnnnnnnnnnnnnnnnnnnnnnnnnnnnnnnnnnnnnnnnnnnnnnnnnnnnnnnnnnnnnnnnnnnnnnnnnnnnnnnnnnnnnnnnnnnnnnnnnnnnnnnnnnnnnnnnnnnnnnnnnnnnnnnnnnnnnnnnnnnnnnnnnnnnnnnnnnnnnnnnnnnnnnnnnnnnnnnnnnnnnnnnnnnnnnnnnnnnnnnnnnnnnnnnnnnnnnnnnnnnnnnnnnnnnnnnnnnnnnnnnnnnnnnnnnnnnnnnnnnnnnnnnnnnnnnnnnnnnnnnnnnnnnnnnnnnnnnnnnnnnnnnnnnnnnnnnnnnnnnnnnnnnnnnnnnnnnnnnnnnnnnnnnnnnnnnnnnnnnnnnnnnnnnnnnnnnnnnnnnnnnnnnnnnnnnnnnnnnnnnnnnnnnnnnnnnnnnnnnnnnnnnnnnnnnnnnnnnnnnnnnnnnnnnnnnnnnnnnnnnnnnnnnnnnnnnnnnnnnnnnnnnnnnnnnnnnnnnnnnnnnnnnnnnnnnnnnnnnnnnnnnnnnnnnnnnnnnnnnnnnnnnnnnnnnnnnnnnnnnnnnnnnnnnnnnnnnnnnnnnnnnnnnnnnnnnnnnnnnnnnnnnnnnnnnnnnnnnnnnnnnnnnnnnnnnnnnnnnnnnnnnnnnnnnnnnnnnnnnnnnnnnnnnnnnnnnnnnnnnnnnnnnnnnnnnnnnnnnnnnnnnnnnnnnnnnnnnnnnnnnnnnnnnnnnnnnnnnnnnnnnnnnnnnnnnnnnnnnnnnnnnnnnnnnnnnnnnnnnnnnnnnnnnnnnnnnnnnnnnnnnnnnnnnnnnnnnnnnnnnnnnnnnnnnnnnnnnnnnnnnnnnnnnnnnnnnnnnnnnnnnnnnnnnnnnnnnnnnnnnnnnnnnnnnnnnnnnnnnnnnnnnnnnnnnnnnnnnnnnnnnnnnnnnnnnnnnnnnnnnnnnnnnnnnnnnnnnnnnnnnnnnnnnnnnnnnnnnnnnnnnnnnnnnnnnnnnnnnnnnnnnnnnnnnnnnnnnnnnnnnnnnnnnnnnnnnnnnnnnnnnnnnnnnnnnnnnnnnnnnnnnnnnnnnnnnnnnnnnnnnnnnnnnnnnnnnnnnnnnnnnnnnnnnnnnnnnnnnnnnnnnnnnnnnnnnnnnnnnnnnnnnnnnnnnnnnnnnnnnnnnnnnnnnnnnnnnnnnnnnnnnnnnnnnnnnnnnnnnnnnnnnnnnnnnnnnnnnnnnnnnnnnnnnnnnnnnnnnnnnnnnnnnnnnnnnnnnnnnnnnnnnnnnnnnnnnnnnnnnnnnnnnnnnnnnnnnnnnnnnnnnnnnnnnnnnnnnnnnnnnnnnnnnnnnnnnnnnnnnnnnnnnnnnnnnnnnnnnnnnnnnnnnnnnnnnnnnnnnnnnnnnnnnnnnnnnnnnnnnnnnnnnnnnnnnnnnnnnnnnnnnnnnnnnnnnnnnnnnnnnnnnnnnnnnnnnnnnnnnnnnnnnnnnnnnnnnnnnnnnnnnnnnnnnnnnnnnnnnnnnnnnnnnnnnnnnnnnnnnnnnnnnnnnnnnnnnnnnnnnnnnnnnnnnnnnnnnnnnnnnnnnnnnnnnnnnnnnnnnnnnnnnnnnnnnnnnnnnnnnnnnnnnnnnnnnnnnnnnnnnnnnnnnnnnnnnnnnnnnnnnnnnnnnnnnnnnnnnnnnnnnnnnnnnnnnnnnnnnnnnnnnnnnnnnnnnnnnnnnnnnnnnnnnnnnnnnnnnnnnnnnnnnnnnnnnnnnnnnnnnnnnnnnnnnnnnnnnnnnnnnnnnnnnnnnnnnnnnnnnnnnnnnnnnnnnnnnnnnnnnnnnnnnnnnnnnnnnnnnnnnnnnnnnnnnnnnnnnnnnnnnnnnnnnnnnnnnnnnnnnnnnnnnnnnnnnnnnnnnnnnnnnnnnnnnnnnnnnnnnnnnnnnnnnnnnnnnnnnnnnnnnnnnnnnnnnnnnnnnnnnnnnnnnnnnnnnnnnnnnnnnnnnnnnnnnnnnnnnnnnnnnnnnnnnnnnnnnnnnnnnnnnnnnnnnnnnnnnnnnnnnnnnnnnnnnnnnnnnnnnnnnnnnnnnnnnnnnnnnnnnnnnnnnnnnnnnnnnnnnnnnnnnnnnnnnnnnnnnnnnnnnnnnnnnnnnnnnnnnnnnnnnnnnnnnnnnnnnnnnnnnnnnnnnnnnnnnnnnnnnnnnnnnnnnnnnnnnnnnnnnnnnnnnnnnnnnnnnnnnnnnnnnnnnnnnnnnnnnnnnnnnnnnnnnnnnnnnnnnnnnnnnnnnnnnnnnnnnnnnnnnnnnnnnnnnnnnnnnnnnnnnnnnnnnnnnnnnnnnnnnnnnnnnnnnnnnnnnnnnnnnnnnnnnnnnnnnnnnnnnnnnnnnnnnnnnnnnnnnnnnnnnnnnnnnnnnnnnnnnnnnnnnnnnnnnnnnnnnnnnnnnnnnnnnnnnnnnnnnnnnnnnnnnnnnnnnnnnnnnnnnnnnnnnnnnnnnnnnnnnnnnnnnnnnnnnnnnnnnnnnnnnnnnnnnnnnnnnnnnnnnnnnnnnnnnnnnnnnnnnnnnnnnnnnnnnnnnnnnnnnnnnnnnnnnnnnnnnnnnnnnnnnnnnnnnnnnnnnnnnnnnnnnnnnnnnnnnnnnnnnnnnnnnnnnnnnnnnnnnnnnnnnnnnnnnnnnnnnnnnnnnnnnnnnnnnnnnnnnnnnnnnnnnnnnnnnnnnnnnnnnnnnnnnnnnnnnnnnnnnnnnnnnnnnnnnnnnnnnnnnnnnnnnnnnnnnnnnnnnnnnnnnnnnnnnnnnnnnnnnnnnnnnnnnnnnnnnnnnnnnnnnnnnnnnnnnnnnnnnnnnnnnnnnnnnnnnnnnnnnnnnnnnnnnnnnnnnnnnnnnnnnnnnnnnnnnnnnnnnnnnnnnnnnnnnnnnnnnnnnnnnnnnnnnnnnnnnnnnnnnnnnnnnnnnnnnnnnnnnnnnnnnnnnnnnnnnnnnnnnnnnnnnnnnnnnnnnnnnnnnnnnnnnnnnnnnnnnnnnnnnnnnnnnnnnnnnnnnnnnnnnnnnnnnnnnnnnnnnnnnnnnnnnnnnnnnnnnnnnnnnnnnnnnnnnnnnnnnnnnnnnnnnnnnnnnnnnnnnnnnnnnnnnnnnnnnnnnnnnnnnnnnnnnnnnnnnnnnnnnnnnnnnnnnnnnnnnnnnnnnnnnnnnnnnnnnnnnnnnnnnnnnnnnnnnnnnnnnnnnnnnnnnnnnnnnnnnnnnnnnnnnnnnnnnnnnnnnnnnnnnnnnnnnnnnnnnnnnnnnnnnnnnnnnnnnnnnnnnnnnnnnnnnnnnnnnnnnnnnnnnnnnnnnnnnnnnnnnnnnnnnnnnnnnnnnnnnnnnnnnnnnnnnnnnnnnnnnnnnnnnnnnnnnnnnnnnnnnnnnnnnnnnnnnnnnnnnnnnnnnnnnnnnnnnnnnnnnnnnnnnnnnnnnnnnnnnnnnnnnnnnnnnnnnnnnnnnnnnnnnnnnnnnnnnnnnnnnnnnnnnnnnnnnnnnnnnnnnnnnnnnnnnnnnnnnnnnnnnnnnnnnnnnnnnnnnnnnnnnnnnnnnnnnnnnnnnnnnnnnnnnnnnnnnnnnnnnnnnnnnnnnnnnnnnnnnnnnnnnnnnnnnnnnnnnnnnnnnnnnnnnnnnnnnnnnnnnnnnnnnnnnnnnnnnnnnnnnnnnnnnnnnnnnnnnnnnnnnnnnnnnnnnnnnnnnnnnnnnnnnnnnnnnnnnnnnnnnnnnnnnnnnnnnnnnnnnnnnnnnnnnnnnnnnnnnnnnnnnnnnnnnnnnnnnnnnnnnnnnnnnnnnnnnnnnnnnnnnnnnnnnnnnnnnnnnnnnnnnnnnnnnnnnnnnnnnnnnnnnnnnnnnnnnnnnnnnnnnnnnnnnnnnnnnnnnnnnnnnnnnnnnnnnnnnnnnnnnnnnnnnnnnnnnnnnnnnnnnnnnnnnnnnnnnnnnnnnnnnnnnnnnnnnnnnnnnnnnnnnnnnnnnnnnnnnnnnnnnnnnnnnnnnnnnnnnnnnnnnnnnnnnnnnnnnnnnnnnnnnnnnnnnnnnnnnnnnnnnnnnnnnnnnnnnnnnnnnnnnnnnnnnnnnnnnnnnnnnnnnnnnnnnnnnnnnnnnnnnnnnnnnnnnnnnnnnnnnnnnnnnnnnnnnnnnnnnnnnnnnnnnnnnnnnnnnnnnnnnnnnnnnnnnnnnnnnnnnnnnnnnnnnnnnnnnnnnnnnnnnnnnnnnnnnnnnnnnnnnnnnnnnnnnnnnnnnnnnnnnnnnnnnnnnnnnnnnnnnnnnnnnnnnnnnnnnnnnnnnnnnnnnnnnnnnnnnnnnnnnnnnnnnnnnnnnnnnnnnnnnnnnnnnnnnnnnnnnnnnnnnnnnnnnnnnnnnnnnnnnnnnnnnnnnnnnnnnnnnnnnnnnnnnnnnnnnnnnnnnnnnnnnnnnnnnnnnnnnnnnnnnnnnnnnnnnnnnnnnnnnnnnnnnnnnnnnnnnnnnnnnnnnnnnnnnnnnnnnnnnnnnnnnnnnnnnnnnnnnnnnnnnnnnnnnnnnnnnnnnnnnnnnnnnnnnnnnnnnnnnnnnnnnnnnnnnnnnnnnnnnnnnnnnnnnnnnnnnnnnnnnnnnnnnnnnnnnnnnnnnnnnnnnnnnnnnnnnnnnnnnnnnnnnnnnnnnnnnnnnnnnnnnnnnnnnnnnnnnnnnnnnnnnnnnnnnnnnnnnnnnnnnnnnnnnnnnnnnnnnnnnnnnnnnnnnnnnnnnnnnnnnnnnnnnnnnnnnnnnnnnnnnnnnnnnnnnnnnnnnnnnnnnnnnnnnnnnnnnnnnnnnnnnnnnnnnnnnnnnnnnnnnnnnnnnnnnnnnnnnnnnnnnnnnnnnnnnnnnnnnnnnnnnnnnnnnnnnnnnnnnnnnnnnnnnnnnnnnnnnnnnnnnnnnnnnnnnnnnnnnnnnnnnnnnnnnnnnnnnnnnnnnnnnnnnnnnnnnnnnnnnnnnnnnnnnnnnnnnnnnnnnnnnnnnnnnnnnnnnnnnnnnnnnnnnnnnnnnnnnnnnnnnnnnnnnnnnnnnnnnnnnnnnnnnnnnnnnnnnnnnnnnnnnnnnnnnnnnnnnnnnnnnnnnnnnnnnnnnnnnnnnnnnnnnnnnnnnnnnnnnnnnnnnnnnnnnnnnnnnnnnnnnnnnnnnnnnnnnnnnnnnnnnnnnnnnnnnnnnnnnnnnnnnnnnnnnnnnnnnnnnnnnnnnnnnnnnnnnnnnnnnnnnnnnnnnnnnnnnnnnnnnnnnnnnnnnnnnnnnnnnnnnnnnnnnnnnnnnnnnnnnnnnnnnnnnnnnnnnnnnnnnnnnnnnnnnnnnnnnnnnnnnnnnnnnnnnnnnnnnnnnnnnnnnnnnnnnnnnnnnnnnnnnnnnnnnnnnnnnnnnnnnnnnnnnnnnnnnnnnnnnnnnnnnnnnnnnnnnnnnnnnnnnnnnnnnnnnnnnnnnnnnnnnnnnnnnnnnnnnnnnnnnnnnnnnnnnnnnnnnnnnnnnnnnnnnnnnnnnnnnnnnnnnnnnnnnnnnnnnnnnnnnnnnnnnnnnnnnnnnnnnnnnnnnnnnnnnnnnnnnnnnnnnnnnnnnnnnnnnnnnnnnnnnnnnnnnnnnnnnnnnnnnnnnnnnnnnnnnnnnnnnnnnnnnnnnnnnnnnnnnnnnnnnnnnnnnnnnnnnnnnnnnnnnnnnnnnnnnnnnnnnnnnnnnnnnnnnnnnnnnnnnnnnnnnnnnnnnnnnnnnnnnnnnnnnnnnnnnnnnnnnnnnnnnnnnnnnnnnnnnnnnnnnnnnnnnnnnnnnnnnnnnnnnnnnnnnnnnnnnnnnnnnnnnnnnnnnnnnnnnnnnnnnnnnnnnnnnnnnnnnnnnnnnnnnnnnnnnnnnnnnnnnnnnnnnnnnnnnnnnnnnnnnnnnnnnnnnnnnnnnnnnnnnnnnnnnnnnnnnnnnnnnnnnnnnnnnnnnnnnnnnnnnnnnnnnnnnnnnnnnnnnnnnnnnnnnnnnnnnnnnnnnnnnnnnnnnnnnnnnnnnnnnnnnnnnnnnnnnnnnnnnnnnnnnnnnnnnnnnnnnnnnnnnnnnnnnnnnnnnnnnnnnnnnnnnnnnnnnnnnnnnnnnnnnnnnnnnnnnnnnnnnnnnnnnnnnnnnnnnnnnnnnnnnnnnnnnnnnnnnnnnnnnnnnnnnnnnnnnnnnnnnnnnnnnnnnnnnnnnnnnnnnnnnnnnnnnnnnnnnnnnnnnnnnnnnnnnnnnnnnnnnnnnnnnnnnnnnnnnnnnnnnnnnnnnnnnnnnnnnnnnnnnnnnnnnnnnnnnnnnnnnnnnnnnnnnnnnnnnnnnnnnnnnnnnnnnnnnnnnnnnnnnnnnnnnnnnnnnnnnnnnnnnnnnnnnnnnnnnnnnnnnnnnnnnnnnnnnnnnnnnnnnnnnnnnnnnnnnnnnnnnnnnnnnnnnnnnnnnnnnnnnnnnnnnnnnnnnnnnnnnnnnnnnnnnnnnnnnnnnnnnnnnnnnnnnnnnnnnnnnnnnnnnnnnnnnnnnnnnnnnnnnnnnnnnnnnnnnnnnnnnnnnnnnnnnnnnnnnnnnnnnnnnnnnnnnnnnnnnnnnnnnnnnnnnnnnnnnnnnnnnnnnnnnnnnnnnnnnnnnnnnnnnnnnnnnnnnnnnnnnnnnnnnnnnnnnnnnnnnnnnnnnnnnnnnnnnnnnnnnnnnnnnnnnnnnnnnnnnnnnnnnnnnnnnnnnnnnnnnnnnnnnnnnnnnnnnnnnnnnnnnnnnnnnnnnnnnnnnnnnnnnnnnnnnnnnnnnnnnnnnnnnnnnnnnnnnnnnnnnnnnnnnnnnnnnnnnnnnnnnnnnnnnnnnnnnnnnnnnnnnnnnnnnnnnnnnnnnnnnnnnnnnnnnnnnnnnnnnnnnnnnnnnnnnnnnnnnnnnnnnnnnnnnnnnnnnnnnnnnnnnnnnnnnnnnnnnnnnnnnnnnnnnnnnnnnnnnnnnnnnnnnnnnnnnnnnnnnnnnnnnnnnnnnnnnnnnnnnnnnnnnnnnnnnnnnnnnnnnnnnnnnnnnnnnnnnnnnnnnnnnnnnnnnnnnnnnnnnnnnnnnnnnnnnnnnnnnnnnnnnnnnnnnnnnnnnnnnnnnnnnnnnnnnnnnnnnnnnnnnnnnnnnnnnnnnnnnnnnnnnnnnnnnnnnnnnnnnnnnnnnnnnnnnnnnnnnnnnnnnnnnnnnnnnnnnnnnnnnnnnnnnnnnnnnnnnnnnnnnnnnnnnnnnnnnnnnnnnnnnnnnnnnnnnnnnnnnnnnnnnnnnnnnnnnnnnnnnnnnnnnnnnnnnnnnnnnnnnnnnnnnnnnnnnnnnnnnnnnnnnnnnnnnnnnnnnnnnnnnnnnnnnnnnnnnnnnnnnnnnnnnnnnnnnnnnnnnnnnnnnnnnnnnnnnnnnnnnnnnnnnnnnnnnnnnnnnnnnnnnnnnnnnnnnnnnnnnnnnnnnnnnnnnnnnnnnnnnnnnnnnnnnnnnnnnnnnnnnnnnnnnnnnnnnnnnnnnnnnnnnnnnnnnnnnnnnnnnnnnnnnnnnnnnnnnnnnnnnnnnnnnnnnnnnnnnnnnnnnnnnnnnnnnnnnnnnnnnnnnnnnnnnnnnnnnnnnnnnnnnnnnnnnnnnnnnnnnnnnnnnnnnnnnnnnnnnnnnnnnnnnnnnnnnnnnnnnnnnnnnnnnnnnnnnnnnnnnnnnnnnnnnnnnnnnnnnnnnnnnnnnnnnnnnnnnnnnnnnnnnnnnnnnnnnnnnnnnnnnnnnnnnnnnnnnnnnnnnnnnnnnnnnnnnnnnnnnnnnnnnnnnnnnnnnnnnnnnnnnnnnnnnnnnnnnnnnnnnnnnnnnnnnnnnnnnnnnnnnnnnnnnnnnnnnnnnnnnnnnnnnnnnnnnnnnnnnnnnnnnnnnnnnnnnnnnnnnnnnnnnnnnnnnnnnnnnnnnnnnnnnnnnnnnnnnnnnnnnnnnnnnnnnnnnnnnnnnnnnnnnnnnnnnnnnnnnnnnnnnnnnnnnnnnnnnnnnnnnnnnnnnnnnnnnnnnnnnnnnnnnnnnnnnnnnnnnnnnnnnnnnnnnnnnnnnnnnnnnnnnnnnnnnnnnnnnnnnnnnnnnnnnnnnnnnnnnnnnnnnnnnnnnnnnnnnnnnnnnnnnnnnnnnnnnnnnnnnnnnnnnnnnnnnnnnnnnnnnnnnnnnnnnnnnnnnnnnnnnnnnnnnnnnnnnnnnnnnnnnnnnnnnnnnnnnnnnnnnnnnnnnnnnnnnnnnnnnnnnnnnnnnnnnnnnnnnnnnnnnnnnnnnnnnnnnnnnnnnnnnnnnnnnnnnnnnnnnnnnnnnnnnnnnnnnnnnnnnnnnnnnnnnnnnnnnnnnnnnnnnnnnnnnnnnnnnnnnnnnnnnnnnnnnnnnnnnnnnnnnnnnnnnnnnnnnnnnnnnnnnnnnnnnnnnnnnnnnnnnnnnnnnnnnnnnnnnnnnnnnnnnnnnnnnnnnnnnnnnnnnnnnnnnnnnnnnnnnnnnnnnnnnnnnnnnnnnnnnnnnnnnnnnnnnnnnnnnnnnnnnnnnnnnnnnnnnnnnnnnnnnnnnnnnnnnnnnnnnnnnnnnnnnnnnnnnnnnnnnnnnnnnnnnnnnnnnnnnnnnnnnnnnnnnnnnnnnnnnnnnnnnnnnnnnnnnnnnnnnnnnnnnnnnnnnnnnnnnnnnnnnnnnnnnnnnnnnnnnnnnnnnnnnnnnnnnnnnnnnnnnnnnnnnnnnnnnnnnnnnnnnnnnnnnnnnnnnnnnnnnnnnnnnnnnnnnnnnnnnnnnnnnnnnnnnnnnnnnnnnnnnnnnnnnnnnnnnnnnnnnnnnnnnnnnnnnnnnnnnnnnnnnnnnnnnnnnnnnnnnnnnnnnnnnnnnnnnnnnnnnnnnnnnnnnnnnnnnnnnnnnnnnnnnnnnnnnnnnnnnnnnnnnnnnnnnnnnnnnnnnnnnnnnnnnnnnnnnnnnnnnnnnnnnnnnnnnnnnnnnnnnnnnnnnnnnnnnnnnnnnnnnnnnnnnnnnnnnnnnnnnnnnnnnnnnnnnnnnnnnnnnnnnnnnnnnnnnnnnnnnnnnnnnnnnnnnnnnnnnnnnnnnnnnnnnnnnnnnnnnnnnnnnnnnnnnnnnnnnnnnnnnnnnnnnnnnnnnnnnnnnnnnnnnnnnnnnnnnnnnnnnnnnnnnnnnnnnnnnnnnnnnnnnnnnnnnnnnnnnnnnnnnnnnnnnnnnnnnnnnnnnnnnnnnnnnnnnnnnnnnnnnnnnnnnnnnnnnnnnnnnnnnnnnnnnnnnnnnnnnnnnnnnnnnnnnnnnnnnnnnnnnnnnnnnnnnnnnnnnnnnnnnnnnnnnnnnnnnnnnnnnnnnnnnnnnnnnnnnnnnnnnnnnnnnnnnnnnnnnnnnnnnnnnnnnnnnnnnnnnnnnnnnnnnnnnnnnnnnnnnnnnnnnnnnnnnnnnnnnnnnnnnnnnnnnnnnnnnnnnnnnnnnnnnnnnnnnnnnnnnnnnnnnnnnnnnnnnnnnnnnnnnnnnnnnnnnnnnnnnnnnnnnnnnnnnnnnnnnnnnnnnnnnnnnnnnnnnnnnnnnnnnnnnnnnnnnnnnnnnnnnnnnnnnnnnnnnnnnnnnnnnnnnnnnnnnnnnnnnnnnnnnnnnnnnnnnnnnnnnnnnnnnnnnnnnnnnnnnnnnnnnnnnnnnnnnnnnnnnnnnnnnnnnnnnnnnnnnnnnnnnnnnnnnnnnnnnnnnnnnnnnnnnnnnnnnnnnnnnnnnnnnnnnnnnnnnnnnnnnnnnnnnnnnnnnnnnnnnnnnnnnnnnnnnnnnnnnnnnnnnnnnnnnnnnnnnnnnnnnnnnnnnnnnnnnnnnnnnnnnnnnnnnnnnnnnnnnnnnnnnnnnnnnnnnnnnnnnnnnnnnnnnnnnnnnnnnnnnnnnnnnnnnnnnnnnnnnnnnnnnnnnnnnnnnnnnnnnnnnnnnnnnnnnnnnnnnnnnnnnnnnnnnnnnnnnnnnnnnnnnnnnnnnnnnnnnnnnnnnnnnnnnnnnnnnnnnnnnnnnnnnnnnnnnnnnnnnnnnnnnnnnnnnnnnnnnnnnnnnnnnnnnnnnnnnnnnnnnnnnnnnnnnnnnnnnnnnnnnnnnnnnnnnnnnnnnnnnnnnnnnnnnnnnnnnnnnnnnnnnnnnnnnnnnnnnnnnnnnnnnnnnnnnnnnnnnnnnnnnnnnnnnnnnnnnnnnnnnnnnnnnnnnnnnnnnnnnnnnnnnnnnnnnnnnnnnnnnnnnnnnnnnnnnnnnnnnnnnnnnnnnnnnnnnnnnnnnnnnnnnnnnnnnnnnnnnnnnnnnnnnnnnnnnnnnnnnnnnnnnnnnnnnnnnnnnnnnnnnnnnnnnnnnnnnnnnnnnnnnnnnnnnnnnnnnnnnnnnnnnnnnnnnnnnnnnnnnnnnnnnnnnnnnnnnnnnnnnnnnnnnnnnnnnnnnnnnnnnnnnnnnnnnnnnnnnnnnnnnnnnnnnnnnnnnnnnnnnnnnnnnnnnnnnnnnnnnnnnnnnnnnnnnnnnnnnnnnnnnnnnnnnnnnnnnnnnnnnnnnnnnnnnnnnnnnnnnnnnnnnnnnnnnnnnnnnnnnnnnnnnnnnnnnnnnnnnnnnnnnnnnnnnnnnnnnnnnnnnnnnnnnnnnnnnnnnnnnnnnnnnnnnnnnnnnnnnnnnnnnnnnnnnnnnnnnnnnnnnnnnnnnnnnnnnnnnnnnnnnnnnnnnnnnnnnnnnnnnnnnnnnnnnnnnnnnnnnnnnnnnnnnnnnnnnnnnnnnnnnnnnnnnnnnnnnnnnnnnnnnnnnnnnnnnnnnnnnnnnnnnnnnnnnnnnnnnnnnnnnnnnnnnnnnnnnnnnnnnnnnnnnnnnnnnnnnnnnnnnnnnnnnnnnnnnnnnnnnnnnnnnnnnnnnnnnnnnnnnnnnnnnnnnnnnnnnnnnnnnnnnnnnnnnnnnnnnnnnnnnnnnnnnnnnnnnnnnnnnnnnnnnnnnnnnnnnnnnnnnnnnnnnnnnnnnnnnnnnnnnnnnnnnnnnnnnnnnnnnnnnnnnnnnnnnnnnnnnnnnnnnnnnnnnnnnnnnnnnnnnnnnnnnnnnnnnnnnnnnnnnnnnnnnnnnnnnnnnnnnnnnnnnnnnnnnnnnnnnnnnnnnnnnnnnnnnnnnnnnnnnnnnnnnnnnnnnnnnnnnnnnnnnnnnnnnnnnnnnnnnnnnnnnnnnnnnnnnnnnnnnnnnnnnnnnnnnnnnnnnnnnnnnnnnnnnnnnnnnnnnnnnnnnnnnnnnnnnnnnnnnnnnnnnnnnnnnnnnnnnnnnnnnnnnnnnnnnnnnnnnnnnnnnnnnnnnnnnnnnnnnnnnnnnnnnnnnnnnnnnnnnnnnnnnnnnnnnnnnnnnnnnnnnnnnnnnnnnnnnnnnnnnnnnnnnnnnnnnnnnnnnnnnnnnnnnnnnnnnnnnnnnnnnnnnnnnnnnnnnnnnnnnnnnnnnnnnnnnnnnnnnnnnnnnnnnnnnnnnnnnnnnnnnnnnnnnnnnnnnnnnnnnnnnnnnnnnnnnnnnnnnnnnnnnnnnnnnnnnnnnnnnnnnnnnnnnnnnnnnnnnnnnnnnnnnnnnnnnnnnnnnnnnnnnnnnnnnnnnnnnnnnnnnnnnnnnnnnnnnnnnnnnnnnnnnnnnnnnnnnnnnnnnnnnnnnnnnnnnnnnnnnnnnnnnnnnnnnnnnnnnnnnnnnnnnnnnnnnnnnnnnnnnnnnnnnnnnnnnnnnnnnnnnnnnnnnnnnnnnnnnnnnnnnnnnnnnnnnnnnnnnnnnnnnnnnnnnnnnnnnnnnnnnnnnnnnnnnnnnnnnnnnnnnnnnnnnnnnnnnnnnnnnnnnnnnnnnnnnnnnnnnnnnnnnnnnnnnnnnnnnnnnnnnnnnnnnnnnnnnnnnnnnnnnnnnnnnnnnnnnnnnnnnnnnnnnnnnnnnnnnnnnnnnnnnnnnnnnnnnnnnnnnnnnnnnnnnnnnnnnnnnnnnnnnnnnnnnnnnnnnnnnnnnnnnnnnnnnnnnnnnnnnnnnnnnnnnnnnnnnnnnnnnnnnnnnnnnnnnnnnnnnnnnnnnnnnnnnnnnnnnnnnnnnnnnnnnnnnnnnnnnnnnnnnnnnnnnnnnnnnnnnnnnnnnnnnnnnnnnnnnnnnnnnnnnnnnnnnnnnnnnnnnnnnnnnnnnnnnnnnnnnnnnnnnnnnnnnnnnnnnnnnnnnnnnnnnnnnnnnnnnnnnnnnnnnnnnnnnnnnnnnnnnnnnnnnnnnnnnnnnnnnnnnnnnnnnnnnnnnnnnnnnnnnnnnnnnnnnnnnnnnnnnnnnnnnnnnnnnnnnnnnnnnnnnnnnnnnnnnnnnnnnnnnnnnnnnnnnnnnnnnnnnnnnnnnnnnnnnnnnnnnnnnnnnnnnnnnnnnnnnnnnnnnnnnnnnnnnnnnnnnnnnnnnnnnnnnnnnnnnnnnnnnnnnnnnnnnnnnnnnnnnnnnnnnnnnnnnnnnnnnnnnnnnnnnnnnnnnnnnnnnnnnnnnnnnnnnnnnnnnnnnnnnnnnnnnnnnnnnnnnnnnnnnnnnnnnnnnnnnnnnnnnnnnnnnnnnnnnnnnnnnnnnnnnnnnnnnnnnnnnnnnnnnnnnnnnnnnnnnnnnnnnnnnnnnnnnnnnnnnnnnnnnnnnnnnnnnnnnnnnnnnnnnnnnnnnnnnnnnnnnnnnnnnnnnnnnnnnnnnnnnnnnnnnnnnnnnnnnnnnnnnnnnnnnnnnnnnnnnnnnnnnnnnnnnnnnnnnnnnnnnnnnnnnnnnnnnnnnnnnnnnnnnnnnnnnnnnnnnnnnnnnnnnnnnnnnnnnnnnnnnnnnnnnnnnnnnnnnnnnnnnnnnnnnnnnnnnnnnnnnnnnnnnnnnnnnnnnnnnnnnnnnnnnnnnnnnnnnnnnnnnnnnnnnnnnnnnnnnnnnnnnnnnnnnnnnnnnnnnnnnnnnnnnnnnnnnnnnnnnnnnnnnnnnnnnnnnnnnnnnnnnnnnnnnnnnnnnnnnnnnnnnnnnnnnnnnnnnnnnnnnnnnnnnnnnnnnnnnnnnnnnnnnnnnnnnnnnnnnnnnnnnnnnnnnnnnnnnnnnnnnnnnnnnnnnnnnnnnnnnnnnnnnnnnnnnnnnnnnnnnnnnnnnnnnnnnnnnnnnnnnnnnnnnnnnnnnnnnnnnnnnnnnnnnnnnnnnnnnnnnnnnnnnnnnnnnnnnnnnnnnnnnnnnnnnnnnnnnnnnnnnnnnnnnnnnnnnnnnnnnnnnnnnnnnnnnnnnnnnnnnnnnnnnnnnnnnnnnnnnnnnnnnnnnnnnnnnnnnnnnnnnnnnnnnnnnnnnnnnnnnnnnnnnnnnnnnnnnnnnnnnnnnnnnnnnnnnnnnnnnnnnnnnnnnnnnnnnnnnnnnnnnnnnnnnnnnnnnnnnnnnnnnnnnnnnnnnnnnnnnnnnnnnnnnnnnnnnnnnnnnnnnnnnnnnnnnnnnnnnnnnnnnnnnnnnnnnnnnnnnnnnnnnnnnnnnnnnnnnnnnnnnnnnnnnnnnnnnnnnnnnnnnnnnnnnnnnnnnnnnnnnnnnnnnnnnnnnnnnnnnnnnnnnnnnnnnnnnnnnnnnnnnnnnnnnnnnnnnnnnnnnnnnnnnnnnnnnnnnnnnnnnnnnnnnnnnnnnnnnnnnnnnnnnnnnnnnnnnnnnnnnnnnnnnnnnnnnnnnnnnnnnnnnnnnnnnnnnnnnnnnnnnnnnnnnnnnnnnnnnnnnnnnnnnnnnnnnnnnnnnnnnnnnnnnnnnnnnnnnnnnnnnnnnnnnnnnnnnnnnnnnnnnnnnnnnnnnnnnnnnnnnnnnnnnnnnnnnnnnnnnnnnnnnnnnnnnnnnnnnnnnnnnnnnnnnnnnnnnnnnnnnnnnnnnnnnnnnnnnnnnnnnnnnnnnnnnnnnnnnnnnnnnnnnnnnnnnnnnnnnnnnnnnnnnnnnnnnnnnnnnnnnnnnnnnnnnnnnnnnnnnnnnnnnnnnnnnnnnnnnnnnnnnnnnnnnnnnnnnnnnnnnnnnnnnnnnnnnnnnnnnnnnnnnnnnnnnnnnnnnnnnnnnnnnnnnnnnnnnnnnnnnnnnnnnnnnnnnnnnnnnnnnnnnnnnnnnnnnnnnnnnnnnnnnnnnnnnnnnnnnnnnnnnnnnnnnnnnnnnnnnnnnnnnnnnnnnnnnnnnnnnnnnnnnnnnnnnnnnnnnnnnnnnnnnnnnnnnnnnnnnnnnnnnnnnnnnnnnnnnnnnnnnnnnnnnnnnnnnnnnnnnnnnnnnnnnnnnnnnnnnnnnnnnnnnnnnnnnnnnnnnnnnnnnnnnnnnnnnnnnnnnnnnnnnnnnnnnnnnnnnnnnnnnnnnnnnnnnnnnnnnnnnnnnnnnnnnnnnnnnnnnnnnnnnnnnnnnnnnnnnnnnnnnnnnnnnnnnnnnnnnnnnnnnnnnnnnnnnnnnnnnnnnnnnnnnnnnnnnnnnnnnnnnnnnnnnnnnnnnnnnnnnnnnnnnnnnnnnnnnnnnnnnnnnnnnnnnnnnnnnnnnnnnnnnnnnnnnnnnnnnnnnnnnnnnnnnnnnnnnnnnnnnnnnnnnnnnnnnnnnnnnnnnnnnnnnnnnnnnnnnnnnnnnnnnnnnnnnnnnnnnnnnnnnnnnnnnnnnnnnnnnnnnnnnnnnnnnnnnnnnnnnnnnnnnnnnnnnnnnnnnnnnnnnnnnnnnnnnnnnnnnnnnnnnnnnnnnnnnnnnnnnnnnnnnnnnnnnnnnnnnnnnnnnnnnnnnnnnnnnnnnnnnnnnnnnnnnnnnnnnnnnnnnnnnnnnnnnnnnnnnnnnnnnnnnnnnnnnnnnnnnnnnnnnnnnnnnnnnnnnnnnnnnnnnnnnnnnnnnnnnnnnnnnnnnnnnnnnnnnnnnnnnnnnnnnnnnnnnnnnnnnnnnnnnnnnnnnnnnnnnnnnnnnnnnnnnnnnnnnnnnnnnnnnnnnnnnnnnnnnnnnnnnnnnnnnnnnnnnnnnnnnnnnnnnnnnnnnnnnnnnnnnnnnnnnnnnnnnnnnnnnnnnnnnnnnnnnnnnnnnnnnnnnnnnnnnnnnnnnnnnnnnnnnnnnnnnnnnnnnnnnnnnnnnnnnnnnnnnnnnnnnnnnnnnnnnnnnnnnnnnnnnnnnnnnnnnnnnnnnnnnnnnnnnnnnnnnnnnnnnnnnnnnnnnnnnnnnnnnnnnnnnnnnnnnnnnnnnnnnnnnnnnnnnnnnnnnnnnnnnnnnnnnnnnnnnnnnnnnnnnnnnnnnnnnnnnnnnnnnnnnnnnnnnnnnnnnnnnnnnnnnnnnnnnnnnnnnnnnnnnnnnnnnnnnnnnnnnnnnnnnnnnnnnnnnnnnnnnnnnnnnnnnnnnnnnnnnnnnnnnnnnnnnnnnnnnnnnnnnnnnnnnnnnnnnnnnnnnnnnnnnnnnnnnnnnnnnnnnnnnnnnnnnnnnnnnnnnnnnnnnnnnnnnnnnnnnnnnnnnnnnnnnnnnnnnnnnnnnnnnnnnnnnnnnnnnnnnnnnnnnnnnnnnnnnnnnnnnnnnnnnnnnnnnnnnnnnnnnnnnnnnnnnnnnnnnnnnnnnnnnnnnnnnnnnnnnnnnnnnnnnnnnnnnnnnnnnnnnnnnnnnnnnnnnnnnnnnnnnnnnnnnnnnnnnnnnnnnnnnnnnnnnnnnnnnnnnnnnnnnnnnnnnnnnnnnnnnnnnnnnnnnnnnnnnnnnnnnnnnnnnnnnnnnnnnnnnnnnnnnnnnnnnnnnnnnnnnnnnnnnnnnnnnnnnnnnnnnnnnnnnnnnnnnnnnnnnnnnnnnnnnnnnnnnnnnnnnnnnnnnnnnnnnnnnnnnnnnnnnnnnnnnnnnnnnnnnnnnnnnnnnnnnnnnnnnnnnnnnnnnnnnnnnnnnnnnnnnnnnnnnnnnnnnnnnnnnnnnnnnnnnnnnnnnnnnnnnnnnnnnnnnnnnnnnnnnnnnnnnnnnnnnnnnnnnnnnnnnnnnnnnnnnnnnnnnnnnnnnnnnnnnnnnnnnnnnnnnnnnnnnnnnnnnnnnnnnnnnnnnnnnnnnnnnnnnnnnnnnnnnnnnnnnnnnnnnnnnnnnnnnnnnnnnnnnnnnnnnnnnnnnnnnnnnnnnnnnnnnnnnnnnnnnnnnnnnnnnnnnnnnnnnnnnnnnnnnnnnnnnnnnnnnnnnnnnnnnnnnnnnnnnnnnnnnnnnnnnnnnnnnnnnnnnnnnnnnnnnnnnnnnnnnnnnnnnnnnnnnnnnnnnnnnnnnnnnnnnnnnnnnnnnnnnnnnnnnnnnnnnnnnnnnnnnnnnnnnnnnnnnnnnnnnnnnnnnnnnnnnnnnnnnnnnnnnnnnnnnnnnnnnnnnnnnnnnnnnnnnnnnnnnnnnnnnnnnnnnnnnnnnnnnnnnnnnnnnnnnnnnnnnnnnnnnnnnnnnnnnnnnnnnnnnnnnnnnnnnnnnnnnnnnnnnnnnnnnnnnnnnnnnnnnnnnnnnnnnnnnnnnnnnnnnnnnnnnnnnnnnnnnnnnnnnnnnnnnnnnnnnnnnnnnnnnnnnnnnnnnnnnnnnnnnnnnnnnnnnnnnnnnnnnnnnnnnnnnnnnnnnnnnnnnnnnnnnnnnnnnnnnnnnnnnnnnnnnnnnnnnnnnnnnnnnnnnnnnnnnnnnnnnnnnnnnnnnnnnnnnnnnnnnnnnnnnnnnnnnnnnnnnnnnnnnnnnnnnnnnnnnnnnnnnnnnnnnnnnnnnnnnnnnnnnnnnnnnnnnnnnnnnnnnnnnnnnnnnnnnnnnnnnnnnnnnnnnnnnnnnnnnnnnnnnnnnnnnnnnnnnnnnnnnnnnnnnnnnnnnnnnnnnnnnnnnnnnnnnnnnnnnnnnnnnnnnnnnnnnnnnnnnnnnnnnnnnnnnnnnnnnnnnnnnnnnnnnnnnnnnnnnnnnnnnnnnnnnnnnnnnnnnnnnnnnnnnnnnnnnnnnnnnnnnnnnnnnnnnnnnnnnnnnnnnnnnnnnnnnnnnnnnnnnnnnnnnnnnnnnnnnnnnnnnnnnnnnnnnnnnnnnnnnnnnnnnnnnnnnnnnnnnnnnnnnnnnnnnnnnnnnnnnnnnnnnnnnnnnnnnnnnnnnnnnnnnnnnnnnnnnnnnnnnnnnnnnnnnnnnnnnnnnnnnnnnnnnnnnnnnnnnnnnnnnnnnnnnnnnnnnnnnnnnnnnnnnnnnnnnnnnnnnnnnnnnnnnnnnnnnnnnnnnnnnnnnnnnnnnnnnnnnnnnnnnnnnnnnnnnnnnnnnnnnnnnnnnnnnnnnnnnnnnnnnnnnnnnnnnnnnnnnnnnnnnnnnnnnnnnnnnnnnnnnnnnnnnnnnnnnnnnnnnnnnnnnnnnnnnnnnnnnnnnnnnnnnnnnnnnnnnnnnnnnnnnnnnnnnnnnnnnnnnnnnnnnnnnnnnnnnnnnnnnnnnnnnnnnnnnnnnnnnnnnnnnnnnnnnnnnnnnnnnnnnnnnnnnnnnnnnnnnnnnnnnnnnnnnnnnnnnnnnnnnnnnnnnnnnnnnnnnnnnnnnnnnnnnnnnnnnnnnnnnnnnnnnnnnnnnnnnnnnnnnnnnnnnnnnnnnnnnnnnnnnnnnnnnnnnnnnnnnnnnnnnnnnnnnnnnnnnnnnnnnnnnnnnnnnnnnnnnnnnnnnnnnnnnnnnnnnnnnnnnnnnnnnnnnnnnnnnnnnnnnnnnnnnnnnnnnnnnnnnnnnnnnnnnnnnnnnnnnnnnnnnnnnnnnnnnnnnnnnnnnnnnnnnnnnnnnnnnnnnnnnnnnnnnnnnnnnnnnnnnnnnnnnnnnnnnnnnnnnnnnnnnnnnnnnnnnnnnnnnnnnnnnnnnnnnnnnnnnnnnnnnnnnnnnnnnnnnnnnnnnnnnnnnnnnnnnnnnnnnnnnnnnnnnnnnnnnnnnnnnnnnnnnnnnnnnnnnnnnnnnnnnnnnnnnnnnnnnnnnnnnnnnnnnnnnnnnnnnnnnnnnnnnnnnnnnnnnnnnnnnnnnnnnnnnnnnnnnnnnnnnnnnnnnnnnnnnnnnnnnnnnnnnnnnnnnnnnnnnnnnnnnnnnnnnnnnnnnnnnnnnnnnnnnnnnnnnnnnnnnnnnnnnnnnnnnnnnnnnnnnnnnnnnnnnnnnnnnnnnnnnnnnnnnnnnnnnnnnnnnnnnnnnnnnnnnnnnnnnnnnnnnnnnnnnnnnnnnnnnnnnnnnnnnnnnnnnnnnnnnnnnnnnnnnnnnnnnnnnnnnnnnnnnnnnnnnnnnnnnnnnnnnnnnnnnnnnnnnnnnnnnnnnnnnnnnnnnnnnnnnnnnnnnnnnnnnnnnnnnnnnnnnnnnnnnnnnnnnnnnnnnnnnnnnnnnnnnnnnnnnnnnnnnnnnnnnnnnnnnnnnnnnnnnnnnnnnnnnnnnnnnnnnnnnnnnnnnnnnnnnnnnnnnnnnnnnnnnnnnnnnnnnnnnnnnnnnnnnnnnnnnnnnnnnnnnnnnnnnnnnnnnnnnnnnnnnnnnnnnnnnnnnnnnnnnnnnnnnnnnnnnnnnnnnnnnnnnnnnnnnnnnnnnnnnnnnnnnnnnnnnnnnnnnnnnnnnnnnnnnnnnnnnnnnnnnnnnnnnnnnnnnnnnnnnnnnnnnnnnnnnnnnnnnnnnnnnnnnnnnnnnnnnnnnnnnnnnnnnnnnnnnnnnnnnnnnnnnnnnnnnnnnnnnnnnnnnnnnnnnnnnnnnnnnnnnnnnnnnnnnnnnnnnnnnnnnnnnnnnnnnnnnnnnnnnnnnnnnnnnnnnnnnnnnnnnnnnnnnnnnnnnnnnnnnnnnnnnnnnnnnnnnnnnnnnnnnnnnnnnnnnnnnnnnnnnnnnnnnnnnnnnnnnnnnnnnnnnnnnnnnnnnnnnnnnnnnnnnnnnnnnnnnnnnnnnnnnnnnnnnnnnnnnnnnnnnnnnnnnnnnnnnnnnnnnnnnnnnnnnnnnnnnnnnnnnnnnnnnnnnnnnnnnnnnnnnnnnnnnnnnnnnnnnnnnnnnnnnnnnnnnnnnnnnnnnnnnnnnnnnnnnnnnnnnnnnnnnnnnnnnnnnnnnnnnnnnnnnnnnnnnnnnnnnnnnnnnnnnnnnnnnnnnnnnnnnnnnnnnnnnnnnnnnnnnnnnnnnnnnnnnnnnnnnnnnnnnnnnnnnnnnnnnnnnnnnnnnnnnnnnnnnnnnnnnnnnnnnnnnnnnnnnnnnnnnnnnnnnnnnnnnnnnnnnnnnnnnnnnnnnnnnnnnnnnnnnnnnnnnnnnnnnnnnnnnnnnnnnnnnnnnnnnnnnnnnnnnnnnnnnnnnnnnnnnnnnnnnnnnnnnnnnnnnnnnnnnnnnnnnnnnnnnnnnnnnnnnnnnnnnnnnnnnnnnnnnnnnnnnnnnnnnnnnnnnnnnnnnnnnnnnnnnnnnnnnnnnnnnnnnnnnnnnnnnnnnnnnnnnnnnnnnnnnnnnnnnnnnnnnnnnnnnnnnnnnnnnnnnnnnnnnnnnnnnnnnnnnnnnnnnnnnnnnnnnnnnnnnnnnnnnnnnnnnnnnnnnnnnnnnnnnnnnnnnnnnnnnnnnnnnnnnnnnnnnnnnnnnnnnnnnnnnnnnnnnnnnnnnnnnnnnnnnnnnnnnnnnnnnnnnnnnnnnnnnnnnnnnnnnnnnnnnnnnnnnnnnnnnnnnnnnnnnnnnnnnnnnnnnnnnnnnnnnnnnnnnnnnnnnnnnnnnnnnnnnnnnnnnnnnnnnnnnnnnnnnnnnnnnnnnnnnnnnnnnnnnnnnnnnnnnnnnnnnnnnnnnnnnnnnnnnnnnnnnnnnnnnnnnnnnnnnnnnnnnnnnnnnnnnnnnnnnnnnnnnnnnnnnnnnnnnnnnnnnnnnnnnnnnnnnnnnnnnnnnnnnnnnnnnnnnnnnnnnnnnnnnnnnnnnnnnnnnnnnnnnnnnnnnnnnnnnnnnnnnnnnnnnnnnnnnnnnnnnnnnnnnnnnnnnnnnnnnnnnnnnnnnnnnnnnnnnnnnnnnnnnnnnnnnnnnnnnnnnnnnnnnnnnnnnnnnnnnnnnnnnnnnnnnnnnnnnnnnnnnnnnnnnnnnnnnnnnnnnnnnnnnnnnnnnnnnnnnnnnnnnnnnnnnnnnnnnnnnnnnnnnnnnnnnnnnnnnnnnnnnnnnnnnnnnnnnnnnnnnnnnnnnnnnnnnnnnnnnnnnnnnnnnnnnnnnnnnnnnnnnnnnnnnnnnnnnnnnnnnnnnnnnnnnnnnnnnnnnnnnnnnnnnnnnnnnnnnnnnnnnnnnnnnnnnnnnnnnnnnnnnnnnnnnnnnnnnnnnnnnnnnnnnnnnnnnnnnnnnnnnnnnnnnnnnnnnnnnnnnnnnnnnnnnnnnnnnnnnnnnnnnnnnnnnnnnnnnnnnnnnnnnnnnnnnnnnnnnnnnnnnnnnnnnnnnnnnnnnnnnnnnnnnnnnnnnnnnnnnnnnnnnnnnnnnnnnnnnnnnnnnnnnnnnnnnnnnnnnnnnnnnnnnnnnnnnnnnnnnnnnnnnnnnnnnnnnnnnnnnnnnnnnnnnnnnnnnnnnnnnnnnnnnnnnnnnnnnnnnnnnnnnnnnnnnnnnnnnnnnnnnnnnnnnnnnnnnnnnnnnnnnnnnnnnnnnnnnnnnnnnnnnnnnnnnnnnnnnnnnnnnnnnnnnnnnnnnnnnnnnnnnnnnnnnnnnnnnnnnnnnnnnnnnnnnnnnnnnnnnnnnnnnnnnnnnnnnnnnnnnnnnnnnnnnnnnnnnnnnnnnnnnnnnnnnnnnnnnnnnnnnnnnnnnnnnnnnnnnnnnnnnnnnnnnnnnnnnnnnnnnnnnnnnnnnnnnnnnnnnnnnnnnnnnnnnnnnnnnnnnnnnnnnnnnnnnnnnnnnnnnnnnnnnnnnnnnnnnnnnnnnnnnnnnnnnnnnnnnnnnnnnnnnnnnnnnnnnnnnnnnnnnnnnnnnnnnnnnnnnnnnnnnnnnnnnnnnnnnnnnnnnnnnnnnnnnnnnnnnnnnnnnnnnnnnnnnnnnnnnnnnnnnnnnnnnnnnnnnnnnnnnnnnnnnnnnnnnnnnnnnnnnnnnnnnnnnnnnnnnnnnnnnnnnnnnnnnnnnnnnnnnnnnnnnnnnnnnnnnnnnnnnnnnnnnnnnnnnnnnnnnnnnnnnnnnnnnnnnnnnnnnnnnnnnnnnnnnnnnnnnnnnnnnnnnnnnnnnnnnnnnnnnnnnnnnnnnnnnnnnnnnnnnnnnnnnnnnnnnnnnnnnnnnnnnnnnnnnnnnnnnnnnnnnnnnnnnnnnnnnnnnnnnnnnnnnnnnnnnnnnnnnnnnnnnnnnnnnnnnnnnnnnnnnnnnnnnnnnnnnnnnnnnnnnnnnnnnnnnnnnnnnnnnnnnnnnnnnnnnnnnnnnnnnnnnnnnnnnnnnnnnnnnnnnnnnnnnnnnnnnnnnnnnnnnnnnnnnnnnnnnnnnnnnnnnnnnnnnnnnnnnnnnnnnnnnnnnnnnnnnnnnnnnnnnnnnnnnnnnnnnnnnnnnnnnnnnnnnnnnnnnnnnnnnnnnnnnnnnnnnnnnnnnnnnnnnnnnnnnnnnnnnnnnnnnnnnnnnnnnnnnnnnnnnnnnnnnnnnnnnnnnnnnnnnnnnnnnnnnnnnnnnnnnnnnnnnnnnnnnnnnnnnnnnnnnnnnnnnnnnnnnnnnnnnnnnnnnnnnnnnnnnnnnnnnnnnnnnnnnnnnnnnnnnnnnnnnnnnnnnnnnnnnnnnnnnnnnnnnnnnnnnnnnnnnnnnnnnnnnnnnnnnnnnnnnnnnnnnnnnnnnnnnnnnnnnnnnnnnnnnnnnnnnnnnnnnnnnnnnnnnnnnnnnnnnnnnnnnnnnnnnnnnnnnnnnnnnnnnnnnnnnnnnnnnnnnnnnnnnnnnnnnnnnnnnnnnnnnnnnnnnnnnnnnnnnnnnnnnnnnnnnnnnnnnnnnnnnnnnnnnnnnnnnnnnnnnnnnnnnnnnnnnnnnnnnnnnnnnnnnnnnnnnnnnnnnnnnnnnnnnnnnnnnnnnnnnnnnnnnnnnnnnnnnnnnnnnnnnnnnnnnnnnnnnnnnnnnnnnnnnnnnnnnnnnnnnnnnnnnnnnnnnnnnnnnnnnnnnnnnnnnnnnnnnnnnnnnnnnnnnnnnnnnnnnnnnnnnnnnnnnnnnnnnnnnnnnnnnnnnnnnnnnnnnnnnnnnnnnnnnnnnnnnnnnnnnnnnnnnnnnnnnnnnnnnnnnnnnnnnnnnnnnnnnnnnnnnnnnnnnnnnnnnnnnnnnnnnnnnnnnnnnnnnnnnnnnnnnnnnnnnnnnnnnnnnnnnnnnnnnnnnnnnnnnnnnnnnnnnnnnnnnnnnnnnnnnnnnnnnnnnnnnnnnnnnnnnnnnnnnnnnnnnnnnnnnnnnnnnnnnnnnnnnnnnnnnnnnnnnnnnnnnnnnnnnnnnnnnnnnnnnnnnnnnnnnnnnnnnnnnnnnnnnnnnnnnnnnnnnnnnnnnnnnnnnnnnnnnnnnnnnnnnnnnnnnnnnnnnnnnnnnnnnnnnnnnnnnnnnnnnnnnnnnnnnnnnnnnnnnnnnnnnnnnnnnnnnnnnnnnnnnnnnnnnnnnnnnnnnnnnnnnnnnnnnnnnnnnnnnnnnnnnnnnnnnnnnnnnnnnnnnnnnnnnnnnnnnnnnnnnnnnnnnnnnnnnnnnnnnnnnnnnnnnnnnnnnnnnnnnnnnnnnnnnnnnnnnnnnnnnnnnnnnnnnnnnnnnnnnnnnnnnnnnnnnnnnnnnnnnnnnnnnnnnnnnnnnnnnnnnnnnnnnnnnnnnnnnnnnnnnnnnnnnnnnnnnnnnnnnnnnnnnnnnnnnnnnnnnnnnnnnnnnnnnnnnnnnnnnnnnnnnnnnnnnnnnnnnnnnnnnnnnnnnnnnnnnnnnnnnnnnnnnnnnnnnnnnnnnnnnnnnnnnnnnnnnnnnnnnnnnnnnnnnnnnnnnnnnnnnnnnnnnnnnnnnnnnnnnnnnnnnnnnnnnnnnnnnnnnnnnnnnnnnnnnnnnnnnnnnnnnnnnnnnnnnnnnnnnnnnnnnnnnnnnnnnnnnnnnnnnnnnnnnnnnnnnnnnnnnnnnnnnnnnnnnnnnnnnnnnnnnnnnnnnnnnnnnnnnnnnnnnnnnnnnnnnnnnnnnnnnnnnnnnnnnnnnnnnnnnnnnnnnnnnnnnnnnnnnnnnnnnnnnnnnnnnnnnnnnnnnnnnnnnnnnnnnnnnnnnnnnnnnnnnnnnnnnnnnnnnnnnnnnnnnnnnnnnnnnnnnnnnnnnnnnnnnnnnnnnnnnnnnnnnnnnnnnnnnnnnnnnnnnnnnnnnnnnnnnnnnnnnnnnnnnnnnnnnnnnnnnnnnnnnnnnnnnnnnnnnnnnnnnnnnnnnnnnnnnnnnnnnnnnnnnnnnnnnnnnnnnnnnnnnnnnnnnnnnnnnnnnnnnnnnnnnnnnnnnnnnnnnnnnnnnnnnnnnnnnnnnnnnnnnnnnnnnnnnnnnnnnnnnnnnnnnnnnnnnnnnnnnnnnnnnnnnnnnnnnnnnnnnnnnnnnnnnnnnnnnnnnnnnnnnnnnnnnnnnnnnnnnnnnnnnnnnnnnnnnnnnnnnnnnnnnnnnnnnnnnnnnnnnnnnnnnnnnnnnnnnnnnnnnnnnnnnnnnnnnnnnnnnnnnnnnnnnnnnnnnnnnnnnnnnnnnnnnnnnnnnnnnnnnnnnnnnnnnnnnnnnnnnnnnnnnnnnnnnnnnnnnnnnnnnnnnnnnnnnnnnnnnnnnnnnnnnnnnnnnnnnnnnnnnnnnnnnnnnnnnnnnnnnnnnnnnnnnnnnnnnnnnnnnnnnnnnnnnnnnnnnnnnnnnnnnnnnnnnnnnnnnnnnnnnnnnnnnnnnnnnnnnnnnnnnnnnnnnnnnnnnnnnnnnnnnnnnnnnnnnnnnnnnnnnnnnnnnnnnnnnnnnnnnnnnnnnnnnnnnnnnnnnnnnnnnnnnnnnnnnnnnnnnnnnnnnnnnnnnnnnnnnnnnnnnnnnnnnnnnnnnnnnnnnnnnnnnnnnnnnnnnnnnnnnnnnnnnnnnnnnnnnnnnnnnnnnnnnnnnnnnnnnnnnnnnnnnnnnnnnnnnnnnnnnnnnnnnnnnnnnnnnnnnnnnnnnnnnnnnnnnnnnnnnnnnnnnnnnnnnnnnnnnnnnnnnnnnnnnnnnnnnnnnnnnnnnnnnnnnnnnnnnnnnnnnnnnnnnnnnnnnnnnnnnnnnnnnnnnnnnnnnnnnnnnnnnnnnnnnnnnnnnnnnnnnnnnnnnnnnnnnnnnnnnnnnnnnnnnnnnnnnnnnnnnnnnnnnnnnnnnnnnnnnnnnnnnnnnnnnnnnnnnnnnnnnnnnnnnnnnnnnnnnnnnnnnnnnnnnnnnnnnnnnnnnnnnnnnnnnnnnnnnnnnnnnnnnnnnnnnnnnnnnnnnnnnnnnnnnnnnnnnnnnnnnnnnnnnnnnnnnnnnnnnnnnnnnnnnnnnnnnnnnnnnnnnnnnnnnnnnnnnnnnnnnnnnnnnnnnnnnnnnnnnnnnnnnnnnnnnnnnnnnnnnnnnnnnnnnnnnnnnnnnnnnnnnnnnnnnnnnnnnnnnnnnnnnnnnnnnnnnnnnnnnnnnnnnnnnnnnnnnnnnnnnnnnnnnnnnnnnnnnnnnnnnnnnnnnnnnnnnnnnnnnnnnnnnnnnnnnnnnnnnnnnnnnnnnnnnnnnnnnnnnnnnnnnnnnnnnnnnnnnnnnnnnnnnnnnnnnnnnnnnnnnnnnnnnnnnnnnnnnnnnnnnnnnnnnnnnnnnnnnnnnnnnnnnnnnnnnnnnnnnnnnnnnnnnnnnnnnnnnnnnnnnnnnnnnnnnnnnnnnnnnnnnnnnnnnnnnnnnnnnnnnnnnnnnnnnnnnnnnnnnnnnnnnnnnnnnnnnnnnnnnnnnnnnnnnnnnnnnnnnnnnnnnnnnnnnnnnnnnnnnnnnnnnnnnnnnnnnnnnnnnnnnnnnnnnnnnnnnnnnnnnnnnnnnnnnnnnnnnnnnnnnnnnnnnnnnnnnnnnnnnnnnnnnnnnnnnnnnnnnnnnnnnnnnnnnnnnnnnnnnnnnnnnnnnnnnnnnnnnnnnnnnnnnnnnnnnnnnnnnnnnnnnnnnnnnnnnnnnnnnnnnnnnnnnnnnnnnnnnnnnnnnnnnnnnnnnnnnnnnnnnnnnnnnnnnnnnnnnnnnnnnnnnnnnnnnnnnnnnnnnnnnnnnnnnnnnnnnnnnnnnnnnnnnnnnnnnnnnnnnnnnnnnnnnnnnnnnnnnnnnnnnnnnnnnnnnnnnnnnnnnnnnnnnnnnnnnnnnnnnnnnnnnnnnnnnnnnnnnnnnnnnnnnnnnnnnnnnnnnnnnnnnnnnnnnnnnnnnnnnnnnnnnnnnnnnnnnnnnnnnnnnnnnnnnnnnnnnnnnnnnnnnnnnnnnnnnnnnnnnnnnnnnnnnnnnnnnnnnnnnnnnnnnnnnnnnnnnnnnnnnnnnnnnnnnnnnnnnnnnnnnnnnnnnnnnnnnnnnnnnnnnnnnnnnnnnnnnnnnnnnnnnnnnnnnnnnnnnnnnnnnnnnnnnnnnnnnnnnnnnnnnnnnnnnnnnnnnnnnnnnnnnnnnnnnnnnnnnnnnnnnnnnnnnnnnnnnnnnnnnnnnnnnnnnnnnnnnnnnnnnnnnnnnnnnnnnnnnnnnnnnnnnnnnnnnnnnnnnnnnnnnnnnnnnnnnnnnnnnnnnnnnnnnnnnnnnnnnnnnnnnnnnnnnnnnnnnnnnnnnnnnnnnnnnnnnnnnnnnnnnnnnnnnnnnnnnnnnnnnnnnnnnnnnnnnnnnnnnnnnnnnnnnnnnnnnnnnnnnnnnnnnnnnnnnnnnnnnnnnnnnnnnnnnnnnnnnnnnnnnnnnnnnnnnnnnnnnnnnnnnnnnnnnnnnnnnnnnnnnnnnnnnnnnnnnnnnnnnnnnnnnnnnnnnnnnnnnnnnnnnnnnnnnnnnnnnnnnnnnnnnnnnnnnnnnnnnnnnnnnnnnnnnnnnnnnnnnnnnnnnnnnnnnnnnnnnnnnnnnnnnnnnnnnnnnnnnnnnnnnnnnnnnnnnnnnnnnnnnnnnnnnnnnnnnnnnnnnnnnnnnnnnnnnnnnnnnnnnnnnnnnnnnnnnnnnnnnnnnnnnnnnnnnnnnnnnnnnnnnnnnnnnnnnnnnnnnnnnnnnnnnnnnnnnnnnnnnnnnnnnnnnnnnnnnnnnnnnnnnnnnnnnnnnnnnnnnnnnnnnnnnnnnnnnnnnnnnnnnnnnnnnnnnnnnnnnnnnnnnnnnnnnnnnnnnnnnnnnnnnnnnnnnnnnnnnnnnnnnnnnnnnnnnnnnnnnnnnnnnnnnnnnnnnnnnnnnnnnnnnnnnnnnnnnnnnnnnnnnnnnnnnnnnnnnnnnnnnnnnnnnnnnnnnnnnnnnnnnnnnnnnnnnnnnnnnnnnnnnnnnnnnnnnnnnnnnnnnnnnnnnnnnnnnnnnnnnnnnnnnnnnnnnnnnnnnnnnnnnnnnnnnnnnnnnnnnnnnnnnnnnnnnnnnnnnnnnnnnnnnnnnnnnnnnnnnnnnnnnnnnnnnnnnnnnnnnnnnnnnnnnnnnnnnnnnnnnnnnnnnnnnnnnnnnnnnnnnnnnnnnnnnnnnnnnnnnnnnnnnnnnnnnnnnnnnnnnnnnnnnnnnnnnnnnnnnnnnnnnnnnnnnnnnnnnnnnnnnnnnnnnnnnnnnnnnnnnnnnnnnnnnnnnnnnnnnnnnnnnnnnnnnnnnnnnnnnnnnnnnnnnnnnnnnnnnnnnnnnnnnnnnnnnnnnnnnnnnnnnnnnnnnnnnnnnnnnnnnnnnnnnnnnnnnnnnnnnnnnnnnnnnnnnnnnnnnnnnnnnnnnnnnnnnnnnnnnnnnnnnnnnnnnnnnnnnnnnnnnnnnnnnnnnnnnnnnnnnnnnnnnnnnnnnnnnnnnnnnnnnnnnnnnnnnnnnnnnnnnnnnnnnnnnnnnnnnnnnnnnnnnnnnnnnnnnnnnnnnnnnnnnnnnnnnnnnnnnnnnnnnnnnnnnnnnnnnnnnnnnnnnnnnnnnnnnnnnnnnnnnnnnnnnnnnnnnnnnnnnnnnnnnnnnnnnnnnnnnnnnnnnnnnnnnnnnnnnnnnnnnnnnnnnnnnnnnnnnnnnnnnnnnnnnnnnnnnnnnnnnnnnnnnnnnnnnnnnnnnnnnnnnnnnnnnnnnnnnnnnnnnnnnnnnnnnnnnnnnnnnnnnnnnnnnnnnnnnnnnnnnnnnnnnnnnnnnnnnnnnnnnnnnnnnnnnnnnnnnnnnnnnnnnnnnnnnnnnnnnnnnnnnnnnnnnnnnnnnnnnnnnnnnnnnnnnnnnnnnnnnnnnnnnnnnnnnnnnnnnnnnnnnnnnnnnnnnnnnnnnnnnnnnnnnnnnnnnnnnnnnnnnnnnnnnnnnnnnnnnnnnnnnnnnnnnnnnnnnnnnnnnnnnnnnnnnnnnnnnnnnnnnnnnnnnnnnnnnnnnnnnnnnnnnnnnnnnnnnnnnnnnnnnnnnnnnnnnnnnnnnnnnnnnnnnnnnnnnnnnnnnnnnnnnnnnnnnnnnnnnnnnnnnnnnnnnnnnnnnnnnnnnnnnnnnnnnnnnnnnnnnnnnnnnnnnnnnnnnnnnnnnnnnnnnnnnnnnnnnnnnnnnnnnnnnnnnnnnnnnnnnnnnnnnnnnnnnnnnnnnnnnnnnnnnnnnnnnnnnnnnnnnnnnnnnnnnnnnnnnnnnnnnnnnnnnnnnnnnnnnnnnnnnnnnnnnnnnnnnnnnnnnnnnnnnnnnnnnnnnnnnnnnnnnnnnnnnnnnnnnnnnnnnnnnnnnnnnnnnnnnnnnnnnnnnnnnnnnnnnnnnnnnnnnnnnnnnnnnnnnnnnnnnnnnnnnnnnnnnnnnnnnnnnnnnnnnnnnnnnnnnnnnnnnnnnnnnnnnnnnnnnnnnnnnnnnnnnnnnnnnnnnnnnnnnnnnnnnnnnnnnnnnnnnnnnnnnnnnnnnnnnnnnnnnnnnnnnnnnnnnnnnnnnnnnnnnnnnnnnnnnnnnnnnnnnnnnnnnnnnnnnnnnnnnnnnnnnnnnnnnnnnnnnnnnnnnnnnnnnnnnnnnnnnnnnnnnnnnnnnnnnnnnnnnnnnnnnnnnnnnnnnnnnnnnnnnnnnnnnnnnnnnnnnnnnnnnnnnnnnnnnnnnnnnnnnnnnnnnnnnnnnnnnnnnnnnnnnnnnnnnnnnnnnnnnnnnnnnnnnnnnnnnnnnnnnnnnnnnnnnnnnnnnnnnnnnnnnnnnnnnnnnnnnnnnnnnnnnnnnnnnnnnnnnnnnnnnnnnnnnnnnnnnnnnnnnnnnnnnnnnnnnnnnnnnnnnnnnnnnnnnnnnnnnnnnnnnnnnnnnnnnnnnnnnnnnnnnnnnnnnnnnnnnnnnnnnnnnnnnnnnnnnnnnnnnnnnnnnnnnnnnnnnnnnnnnnnnnnnnnnnnnnnnnnnnnnnnnnnnnnnnnnnnnnnnnnnnnnnnnnnnnnnnnnnnnnnnnnnnnnnnnnnnnnnnnnnnnnnnnnnnnnnnnnnnnnnnnnnnnnnnnnnnnnnnnnnnnnnnnnnnnnnnnnnnnnnnnnnnnnnnnnnnnnnnnnnnnnnnnnnnnnnnnnnnnnnnnnnnnnnnnnnnnnnnnnnnnnnnnnnnnnnnnnnnnnnnnnnnnnnnnnnnnnnnnnnnnnnnnnnnnnnnnnnnnnnnnnnnnnnnnnnnnnnnnnnnnnnnnnnnnnnnnnnnnnnnnnnnnnnnnnnnnnnnnnnnnnnnnnnnnnnnnnnnnnnnnnnnnnnnnnnnnnnnnnnnnnnnnnnnnnnnnnnnnnnnnnnnnnnnnnnnnnnnnnnnnnnnnnnnnnnnnnnnnnnnnnnnnnnnnnnnnnnnnnnnnnnnnnnnnnnnnnnnnnnnnnnnnnnnnnnnnnnnnnnnnnnnnnnnnnnnnnnnnnnnnnnnnnnnnnnnnnnnnnnnnnnnnnnnnnnnnnnnnnnnnnnnnnnnnnnnnnnnnnnnnnnnnnnnnnnnnnnnnnnnnnnnnnnnnnnnnnnnnnnnnnnnnnnnnnnnnnnnnnnnnnnnnnnnnnnnnnnnnnnnnnnnnnnnnnnnnnnnnnnnnnnnnnnnnnnnnnnnnnnnnnnnnnnnnnnnnnnnnnnnnnnnnnnnnnnnnnnnnnnnnnnnnnnnnnnnnnnnnnnnnnnnnnnnnnnnnnnnnnnnnnnnnnnnnnnnnnnnnnnnnnnnnnnnnnnnnnnnnnnnnnnnnnnnnnnnnnnnnnnnnnnnnnnnnnnnnnnnnnnnnnnnnnnnnnnnnnnnnnnnnnnnnnnnnnnnnnnnnnnnnnnnnnnnnnnnnnnnnnnnnnnnnnnnnnnnnnnnnnnnnnnnnnnnnnnnnnnnnnnnnnnnnnnnnnnnnnnnnnnnnnnnnnnnnnnnnnnnnnnnnnnnnnnnnnnnnnnnnnnnnnnnnnnnnnnnnnnnnnnnnnnnnnnnnnnnnnnnnnnnnnnnnnnnnnnnnnnnnnnnnnnnnnnnnnnnnnnnnnnnnnnnnnnnnnnnnnnnnnnnnnnnnnnnnnnnnnnnnnnnnnnnnnnnnnnnnnnnnnnnnnnnnnnnnnnnnnnnnnnnnnnnnnnnnnnnnnnnnnnnnnnnnnnnnnnnnnnnnnnnnnnnnnnnnnnnnnnnnnnnnnnnnnnnnnnnnnnnnnnnnnnnnnnnnnnnnnnnnnnnnnnnnnnnnnnnnnnnnnnnnnnnnnnnnnnnnnnnnnnnnnnnnnnnnnnnnnnnnnnnnnnnnnnnnnnnnnnnnnnnnnnnnnnnnnnnnnnnnnnnnnnnnnnnnnnnnnnnnnnnnnnnnnnnnnnnnnnnnnnnnnnnnnnnnnnnnnnnnnnnnnnnnnnnnnnnnnnnnnnnnnnnnnnnnnnnnnnnnnnnnnnnnnnnnnnnnnnnnnnnnnnnnnnnnnnnnnnnnnnnnnnnnnnnnnnnnnnnnnnnnnnnnnnnnnnnnnnnnnnnnnnnnnnnnnnnnnnnnnnnnnnnnnnnnnnnnnnnnnnnnnnnnnnnnnnnnnnnnnnnnnnnnnnnnnnnnnnnnnnnnnnnnnnnnnnnnnnnnnnnnnnnnnnnnnnnnnnnnnnnnnnnnnnnnnnnnnnnnnnnnnnnnnnnnnnnnnnnnnnnnnnnnnnnnnnnnnnnnnnnnnnnnnnnnnnnnnnnnnnnnnnnnnnnnnnnnnnnnnnnnnnnnnnnnnnnnnnnnnnnnnnnnnnnnnnnnnnnnnnnnnnnnnnnnnnnnnnnnnnnnnnnnnnnnnnnnnnnnnnnnnnnnnnnnnnnnnnnnnnnnnnnnnnnnnnnnnnnnnnnnnnnnnnnnnnnnnnnnnnnnnnnnnnnnnnnnnnnnnnnnnnnnnnnnnnnnnnnnnnnnnnnnnnnnnnnnnnnnnnnnnnnnnnnnnnnnnnnnnnnnnnnnnnnnnnnnnnnnnnnnnnnnnnnnnnnnnnnnnnnnnnnnnnnnnnnnnnnnnnnnnnnnnnnnnnnnnnnnnnnnnnnnnnnnnnnnnnnnnnnnnnnnnnnnnnnnnnnnnnnnnnnnnnnnnnnnnnnnnnnnnnnnnnnnnnnnnnnnnnnnnnnnnnnnnnnnnnnnnnnnnnnnnnnnnnnnnnnnnnnnnnnnnnnnnnnnnnnnnnnnnnnnnnnnnnnnnnnnnnnnnnnnnnnnnnnnnnnnnnnnnnnnnnnnnnnnnnnnnnnnnnnnnnnnnnnnnnnnnnnnnnnnnnnnnnnnnnnnnnnnnnnnnnnnnnnnnnnnnnnnnnnnnnnnnnnnnnnnnnnnnnnnnnnnnnnnnnnnnnnnnnnnnnnnnnnnnnnnnnnnnnnnnnnnnnnnnnnnnnnnnnnnnnnnnnnnnnnnnnnnnnnnnnnnnnnnnnnnnnnnnnnnnnnnnnnnnnnnnnnnnnnnnnnnnnnnnnnnnnnnnnnnnnnnnnnnnnnnnnnnnnnnnnnnnnnnnnnnnnnnnnnnnnnnnnnnnnnnnnnnnnnnnnnnnnnnnnnnnnnnnnnnnnnnnnnnnnnnnnnnnnnnnnnnnnnnnnnnnnnnnnnnnnnnnnnnnnnnnnnnnnnnnnnnnnnnnnnnnnnnnnnnnnnnnnnnnnnnnnnnnnnnnnnnnnnnnnnnnnnnnnnnnnnnnnnnnnnnnnnnnnnnnnnnnnnnnnnnnnnnnnnnnnnnnnnnnnnnnnnnnnnnnnnnnnnnnnnnnnnnnnnnnnnnnnnnnnnnnnnnnnnnnnnnnnnnnnnnnnnnnnnnnnnnnnnnnnnnnnnnnnnnnnnnnnnnnnnnnnnnnnnnnnnnnnnnnnnnnnnnnnnnnnnnnnnnnnnnnnnnnnnnnnnnnnnnnnnnnnnnnnnnnnnnnnnnnnnnnnnnnnnnnnnnnnnnnnnnnnnnnnnnnnnnnnnnnnnnnnnnnnnnnnnnnnnnnnnnnnnnnnnnnnnnnnnnnnnnnnnnnnnnnnnnnnnnnnnnnnnnnnnnnnnnnnnnnnnnnnnnnnnnnnnnnnnnnnnnnnnnnnnnnnnnnnnnnnnnnnnnnnnnnnnnnnnnnnnnnnnnnnnnnnnnnnnnnnnnnnnnnnnnnnnnnnnnnnnnnnnnnnnnnnnnnnnnnnnnnnnnnnnnnnnnnnnnnnnnnnnnnnnnnnnnnnnnnnnnnnnnnnnnnnnnnnnnnnnnnnnnnnnnnnnnnnnnnnnnnnnnnnnnnnnnnnnnnnnnnnnnnnnnnnnnnnnnnnnnnnnnnnnnnnnnnnnnnnnnnnnnnnnnnnnnnnnnnnnnnnnnnnnnnnnnnnnnnnnnnnnnnnnnnnnnnnnnnnnnnnnnnnnnnnnnnnnnnnnnnnnnnnnnnnnnnnnnnnnnnnnnnnnnnnnnnnnnnnnnnnnnnnnnnnnnnnnnnnnnnnnnnnnnnnnnnnnnnnnnnnnnnnnnnnnnnnnnnnnnnnnnnnnnnnnnnnnnnnnnnnnnnnnnnnnnnnnnnnnnnnnnnnnnnnnnnnnnnnnnnnnnnnnnnnnnnnnnnnnnnnnnnnnnnnnnnnnnnnnnnnnnnnnnnnnnnnnnnnnnnnnnnnnnnnnnnnnnnnnnnnnnnnnnnnnnnnnnnnnnnnnnnnnnnnnnnnnnnnnnnnnnnnnnnnnnnnnnnnnnnnnnnnnnnnnnnnnnnnnnnnnnnnnnnnnnnnnnnnnnnnnnnnnnnnnnnnnnnnnnnnnnnnnnnnnnnnnnnnnnnnnnnnnnnnnnnnnnnnnnnnnnnnnnnnnnnnnnnnnnnnnnnnnnnnnnnnnnnnnnnnnnnnnnnnnnnnnnnnnnnnnnnnnnnnnnnnnnnnnnnnnnnnnnnnnnnnnnnnnnnnnnnnnnnnnnnnnnnnnnnnnnnnnnnnnnnnnnnnnnnnnnnnnnnnnnnnnnnnnnnnnnnnnnnnnnnnnnnnnnnnnnnnnnnnnnnnnnnnnnnnnnnnnnnnnnnnnnnnnnnnnnnnnnnnnnnnnnnnnnnnnnnnnnnnnnnnnnnnnnnnnnnnnnnnnnnnnnnnnnnnnnnnnnnnnnnnnnnnnnnnnnnnnnnnnnnnnnnnnnnnnnnnnnnnnnnnnnnnnnnnnnnnnnnnnnnnnnnnnnnnnnnnnnnnnnnnnnnnnnnnnnnnnnnnnnnnnnnnnnnnnnnnnnnnnnnnnnnnnnnnnnnnnnnnnnnnnnnnnnnnnnnnnnnnnnnnnnnnnnnnnnnnnnnnnnnnnnnnnnnnnnnnnnnnnnnnnnnnnnnnnnnnnnnnnnnnnnnnnnnnnnnnnnnnnnnnnnnnnnnnnnnnnnnnnnnnnnnnnnnnnnnnnnnnnnnnnnnnnnnnnnnnnnnnnnnnnnnnnnnnnnnnnnnnnnnnnnnnnnnnnnnnnnnnnnnnnnnnnnnnnnnnnnnnnnnnnnnnnnnnnnnnnnnnnnnnnnnnnnnnnnnnnnnnnnnnnnnnnnnnnnnnnnnnnnnnnnnnnnnnnnnnnnnnnnnnnnnnnnnnnnnnnnnnnnnnnnnnnnnnnnnnnnnnnnnnnnnnnnnnnnnnnnnnnnnnnnnnnnnnnnnnnnnnnnnnnnnnnnnnnnnnnnnnnnnnnnnnnnnnnnnnnnnnnnnnnnnnnnnnnnnnnnnnnnnnnnnnnnnnnnnnnnnnnnnnnnnnnnnnnnnnnnnnnnnnnnnnnnnnnnnnnnnnnnnnnnnnnnnnnnnnnnnnnnnnnnnnnnnnnnnnnnnnnnnnnnnnnnnnnnnnnnnnnnnnnnnnnnnnnnnnnnnnnnnnnnnnnnnnnnnnnnnnnnnnnnnnnnnnnnnnnnnnnnnnnnnnnnnnnnnnnnnnnnnnnnnnnnnnnnnnnnnnnnnnnnnnnnnnnnnnnnnnnnnnnnnnnnnnnnnnnnnnnnnnnnnnnnnnnnnnnnnnnnnnnnnnnnnnnnnnnnnnnnnnnnnnnnnnnnnnnnnnnnnnnnnnnnnnnnnnnnnnnnnnnnnnnnnnnnnnnnnnnnnnnnnnnnnnnnnnnnnnnnnnnnnnnnnnnnnnnnnnnnnnnnnnnnnnnnnnnnnnnnnnnnnnnnnnnnnnnnnnnnnnnnnnnnnnnnnnnnnnnnnnnnnnnnnnnnnnnnnnnnnnnnnnnnnnnnnnnnnnnnnnnnnnnnnnnnnnnnnnnnnnnnnnnnnnnnnnnnnnnnnnnnnnnnnnnnnnnnnnnnnnnnnnnnnnnnnnnnnnnnnnnnnnnnnnnnnnnnnnnnnnnnnnnnnnnnnnnnnnnnnnnnnnnnnnnnnnnnnnnnnnnnnnnnnnnnnnnnnnnnnnnnnnnnnnnnnnnnnnnnnnnnnnnnnnnnnnnnnnnnnnnnnnnnnnnnnnnnnnnnnnnnnnnnnnnnnnnnnnnnnnnnnnnnnnnnnnnnnnnnnnnnnnnnnnnnnnnnnnnnnnnnnnnnnnnnnnnnnnnnnnnnnnnnnnnnnnnnnnnnnnnnnnnnnnnnnnnnnnnnnnnnnnnnnnnnnnnnnnnnnnnnnnnnnnnnnnnnnnnnnnnnnnnnnnnnnnnnnnnnnnnnnnnnnnnnnnnnnnnnnnnnnnnnnnnnnnnnnnnnnnnnnnnnnnnnnnnnnnnnnnnnnnnnnnnnnnnnnnnnnnnnnnnnnnnnnnnnnnnnnnnnnnnnnnnnnnnnnnnnnnnnnnnnnnnnnnnnnnnnnnnnnnnnnnnnnnnnnnnnnnnnnnnnnnnnnnnnnnnnnnnnnnnnnnnnnnnnnnnnnnnnnnnnnnnnnnnnnnnnnnnnnnnnnnnnnnnnnnnnnnnnnnnnnnnnnnnnnnnnnnnnnnnnnnnnnnnnnnnnnnnnnnnnnnnnnnnnnnnnnnnnnnnnnnnnnnnnnnnnnnnnnnnnnnnnnnnnnnnnnnnnnnnnnnnnnnnnnnnnnnnnnnnnnnnnnnnnnnnnnnnnnnnnnnnnnnnnnnnnnnnnnnnnnnnnnnnnnnnnnnnnnnnnnnnnnnnnnnnnnnnnnnnnnnnnnnnnnnnnnnnnnnnnnnnnnnnnnnnnnnnnnnnnnnnnnnnnnnnnnnnnnnnnnnnnnnnnnnnnnnnnnnnnnnnnnnnnnnnnnnnnnnnnnnnnnnnnnnnnnnnnnnnnnnnnnnnnnnnnnnnnnnnnnnnnnnnnnnnnnnnnnnnnnnnnnnnnnnnnnnnnnnnnnnnnnnnnnnnnnnnnnnnnnnnnnnnnnnnnnnnnnnnnnnnnnnnnnnnnnnnnnnnnnnnnnnnnnnnnnnnnnnnnnnnnnnnnnnnnnnnnnnnnnnnnnnnnnnnnnnnnnnnnnnnnnnnnnnnnnnnnnnnnnnnnnnnnnnnnnnnnnnnnnnnnnnnnnnnnnnnnnnnnnnnnnnnnnnnnnnnnnnnnnnnnnnnnnnnnnnnnnnnnnnnnnnnnnnnnnnnnnnnnnnnnnnnnnnnnnnnnnnnnnnnnnnnnnnnnnnnnnnnnnnnnnnnnnnnnnnnnnnnnnnnnnnnnnnnnnnnnnnnnnnnnnnnnnnnnnnnnnnnnnnnnnnnnnnnnnnnnnnnnnnnnnnnnnnnnnnnnnnnnnnnnnnnnnnnnnnnnnnnnnnnnnnnnnnnnnnnnnnnnnnnnnnnnnnnnnnnnnnnnnnnnnnnnnnnnnnnnnnnnnnnnnnnnnnnnnnnnnnnnnnnnnnnnnnnnnnnnnnnnnnnnnnnnnnnnnnnnnnnnnnnnnnnnnnnnnnnnnnnnnnnnnnnnnnnnnnnnnnnnnnnnnnnnnnnnnnnnnnnnnnnnnnnnnnnnnnnnnnnnnnnnnnnnnnnnnnnnnnnnnnnnnnnnnnnnnnnnnnnnnnnnnnnnnnnnnnnnnnnnnnnnnnnnnnnnnnnnnnnnnnnnnnnnnnnnnnnnnnnnnnnnnnnnnnnnnnnnnnnnnnnnnnnnnnnnnnnnnnnnnnnnnnnnnnnnnnnnnnnnnnnnnnnnnnnnnnnnnnnnnnnnnnnnnnnnnnnnnnnnnnnnnnnnnnnnnnnnnnnnnnnnnnnnnnnnnnnnnnnnnnnnnnnnnnnnnnnnnnnnnnnnnnnnnnnnnnnnnnnnnnnnnnnnnnnnnnnnnnnnnnnnnnnnnnnnnnnnnnnnnnnnnnnnnnnnnnnnnnnnnnnnnnnnnnnnnnnnnnnnnnnnnnnnnnnnnnnnnnnnnnnnnnnnnnnnnnnnnnnnnnnnnnnnnnnnnnnnnnnnnnnnnnnnnnnnnnnnnnnnnnnnnnnnnnnnnnnnnnnnnnnnnnnnnnnnnnnnnnnnnnnnnnnnnnnnnnnnnnnnnnnnnnnnnnnnnnnnnnnnnnnnnnnnnnnnnnnnnnnnnnnnnnnnnnnnnnnnnnnnnnnnnnnnnnnnnnnnnnnnnnnnnnnnnnnnnnnnnnnnnnnnnnnnnnnnnnnnnnnnnnnnnnnnnnnnnnnnnnnnnnnnnnnnnnnnnnnnnnnnnnnnnnnnnnnnnnnnnnnnnnnnnnnnnnnnnnnnnnnnnnnnnnnnnnnnnnnnnnnnnnnnnnnnnnnnnnnnnnnnnnnnnnnnnnnnnnnnnnnnnnnnnnnnnnnnnnnnnnnnnnnnnnnnnnnnnnnnnnnnnnnnnnnnnnnnnnnnnnnnnnnnnnnnnnnnnnnnnnnnnnnnnnnnnnnnnnnnnnnnnnnnnnnnnnnnnnnnnnnnnnnnnnnnnnnnnnnnnnnnnnnnnnnnnnnnnnnnnnnnnnnnnnnnnnnnnnnnnnnnnnnnnnnnnnnnnnnnnnnnnnnnnnnnnnnnnnnnnnnnnnnnnnnnnnnnnnnnnnnnnnnnnnnnnnnnnnnnnnnnnnnnnnnnnnnnnnnnnnnnnnnnnnnnnnnnnnnnnnnnnnnnnnnnnnnnnnnnnnnnnnnnnnnnnnnnnnnnnnnnnnnnnnnnnnnnnnnnnnnnnnnnnnnnnnnnnnnnnnnnnnnnnnnnnnnnnnnnnnnnnnnnnnnnnnnnnnnnnnnnnnnnnnnnnnnnnnnnnnnnnnnnnnnnnnnnnnnnnnnnnnnnnnnnnnnnnnnnnnnnnnnnnnnnnnnnnnnnnnnnnnnnnnnnnnnnnnnnnnnnnnnnnnnnnnnnnnnnnnnnnnnnnnnnnnnnnnnnnnnnnnnnnnnnnnnnnnnnnnnnnnnnnnnnnnnnnnnnnnnnnnnnnnnnnnnnnnnnnnnnnnnnnnnnnnnnnnnnnnnnnnnnnnnnnnnnnnnnnnnnnnnnnnnnnnnnnnnnnnnnnnnnnnnnnnnnnnnnnnnnnnnnnnnnnnnnnnnnnnnnnnnnnnnnnnnnnnnnnnnnnnnnnnnnnnnnnnnnnnnnnnnnnnnnnnnnnnnnnnnnnnnnnnnnnnnnnnnnnnnnnnnnnnnnnnnnnnnnnnnnnnnnnnnnnnnnnnnnnnnnnnnnnnnnnnnnnnnnnnnnnnnnnnnnnnnnnnnnnnnnnnnnnnnnnnnnnnnnnnnnnnnnnnnnnnnnnnnnnnnnnnnnnnnnnnnnnnnnnnnnnnnnnnnnnnnnnnnnnnnnnnnnnnnnnnnnnnnnnnnnnnnnnnnnnnnnnnnnnnnnnnnnnnnnnnnnnnnnnnnnnnnnnnnnnnnnnnnnnnnnnnnnnnnnnnnnnnnnnnnnnnnnnnnnnnnnnnnnnnnnnnnnnnnnnnnnnnnnnnnnnnnnnnnnnnnnnnnnnnnnnnnnnnnnnnnnnnnnnnnnnnnnnnnnnnnnnnnnnnnnnnnnnnnnnnnnnnnnnnnnnnnnnnnnnnnnnnnnnnnnnnnnnnnnnnnnnnnnnnnnnnnnnnnnnnnnnnnnnnnnnnnnnnnnnnnnnnnnnnnnnnnnnnnnnnnnnnnnnnnnnnnnnnnnnnnnnnnnnnnnnnnnnnnnnnnnnnnnnnnnnnnnnnnnnnnnnnnnnnnnnnnnnnnnnnnnnnnnnnnnnnnnnnnnnnnnnnnnnnnnnnnnnnnnnnnnnnnnnnnnnnnnnnnnnnnnnnnnnnnnnnnnnnnnnnnnnnnnnnnnnnnnnnnnnnnnnnnnnnnnnnnnnnnnnnnnnnnnnnnnnnnnnnnnnnnnnnnnnnnnnnnnnnnnnnnnnnnnnnnnnnnnnnnnnnnnnnnnnnnnnnnnnnnnnnnnnnnnnnnnnnnnnnnnnnnnnnnnnnnnnnnnnnnnnnnnnnnnnnnnnnnnnnnnnnnnnnnnnnnnnnnnnnnnnnnnnnnnnnnnnnnnnnnnnnnnnnnnnnnnnnnnnnnnnnnnnnnnnnnnnnnnnnnnnnnnnnnnnnnnnnnnnnnnnnnnnnnnnnnnnnnnnnnnnnnnnnnnnnnnnnnnnnnnnnnnnnnnnnnnnnnnnnnnnnnnnnnnnnnnnnnnnnnnnnnnnnnnnnnnnnnnnnnnnnnnnnnnnnnnnnnnnnnnnnnnnnnnnnnnnnnnnnnnnnnnnnnnnnnnnnnnnnnnnnnnnnnnnnnnnnnnnnnnnnnnnnnnnnnnnnnnnnnnnnnnnnnnnnnnnnnnnnnnnnnnnnnnnnnnnnnnnnnnnnnnnnnnnnnnnnnnnnnnnnnnnnnnnnnnnnnnnnnnnnnnnnnnnnnnnnnnnnnnnnnnnnnnnnnnnnnnnnnnnnnnnnnnnnnnnnnnnnnnnnnnnnnnnnnnnnnnnnnnnnnnnnnnnnnnnnnnnnnnnnnnnnnnnnnnnnnnnnnnnnnnnnnnnnnnnnnnnnnnnnnnnnnnnnnnnnnnnnnnnnnnnnnnnnnnnnnnnnnnnnnnnnnnnnnnnnnnnnnnnnnnnnnnnnnnnnnnnnnnnnnnnnnnnnnnnnnnnnnnnnnnnnnnnnnnnnnnnnnnnnnnnnnnnnnnnnnnnnnnnnnnnnnnnnnnnnnnnnnnnnnnnnnnnnnnnnnnnnnnnnnnnnnnnnnnnnnnnnnnnnnnnnnnnnnnnnnnnnnnnnnnnnnnnnnnnnnnnnnnnnnnnnnnnnnnnnnnnnnnnnnnnnnnnnnnnnnnnnnnnnnnnnnnnnnnnnnnnnnnnnnnnnnnnnnnnnnnnnnnnnnnnnnnnnnnnnnnnnnnnnnnnnnnnnnnnnnnnnnnnnnnnnnnnnnnnnnnnnnnnnnnnnnnnnnnnnnnnnnnnnnnnnnnnnnnnnnnnnnnnnnnnnnnnnnnnnnnnnnnnnnnnnnnnnnnnnnnnnnnnnnnnnnnnnnnnnnnnnnnnnnnnnnnnnnnnnnnnnnnnnnnnnnnnnnnnnnnnnnnnnnnnnnnnnnnnnnnnnnnnnnnnnnnnnnnnnnnnnnnnnnnnnnnnnnnnnnnnnnnnnnnnnnnnnnnnnnnnnnnnnnnnnnnnnnnnnnnnnnnnnnnnnnnnnnnnnnnnnnnnnnnnnnnnnnnnnnnnnnnnnnnnnnnnnnnnnnnnnnnnnnnnnnnnnnnnnnnnnnnnnnnnnnnnnnnnnnnnnnnnnnnnnnnnnnnnnnnnnnnnnnnnnnnnnnnnnnnnnnnnnnnnnnnnnnnnnnnnnnnnnnnnnnnnnnnnnnnnnnnnnnnnnnnnnnnnnnnnnnnnnnnnnnnnnnnnnnnnnnnnnnnnnnnnnnnnnnnnnnnnnnnnnnnnnnnnnnnnnnnnnnnnnnnnnnnnnnnnnnnnnnnnnnnnnnnnnnnnnnnnnnnnnnnnnnnnnnnnnnnnnnnnnnnnnnnnnnnnnnnnnnnnnnnnnnnnnnnnnnnnnnnnnnnnnnnnnnnnnnnnnnnnnnnnnnnnnnnnnnnnnnnnnnnnnnnnnnnnnnnnnnnnnnnnnnnnnnnnnnnnnnnnnnnnnnnnnnnnnnnnnnnnnnnnnnnnnnnnnnnnnnnnnnnnnnnnnnnnnnnnnnnnnnnnnnnnnnnnnnnnnnnnnnnnnnnnnnnnnnnnnnnnnnnnnnnnnnnnnnnnnnnnnnnnnnnnnnnnnnnnnnnnnnnnnnnnnnnnnnnnnnnnnnnnnnnnnnnnnnnnnnnnnnnnnnnnnnnnnnnnnnnnnnnnnnnnnnnnnnnnnnnnnnnnnnnnnnnnnnnnnnnnnnnnnnnnnnnnnnnnnnnnnnnnnnnnnnnnnnnnnnnnnnnnnnnnnnnnnnnnnnnnnnnnnnnnnnnnnnnnnnnnnnnnnnnnnnnnnnnnnnnnnnnnnnnnnnnnnnnnnnnnnnnnnnnnnnnnnnnnnnnnnnnnnnnnnnnnnnnnnnnnnnnnnnnnnnnnnnnnnnnnnnnnnnnnnnnnnnnnnnnnnnnnnnnnnnnnnnnnnnnnnnnnnnnnnnnnnnnnnnnnnnnnnnnnnnnnnnnnnnnnnnnnnnnnnnnnnnnnnnnnnnnnnnnnnnnnnnnnnnnnnnnnnnnnnnnnnnnnnnnnnnnnnnnnnnnnnnnnnnnnnnnnnnnnnnnnnnnnnnnnnnnnnnnnnnnnnnnnnnnnnnnnnnnnnnnnnnnnnnnnnnnnnnnnnnnnnnnnnnnnnnnnnnnnnnnnnnnnnnnnnnnnnnnnnnnnnnnnnnnnnnnnnnnnnnnnnnnnnnnnnnnnnnnnnnnnnnnnnnnnnnnnnnnnnnnnnnnnnnnnnnnnnnnnnnnnnnnnnnnnnnnnnnnnnnnnnnnnnnnnnnnnnnnnnnnnnnnnnnnnnnnnnnnnnnnnnnnnnnnnnnnnnnnnnnnnnnnnnnnnnnnnnnnnnnnnnnnnnnnnnnnnnnnnnnnnnnnnnnnnnnnnnnnnnnnnnnnnnnnnnnnnnnnnnnnnnnnnnnnnnnnnnnnnnnnnnnnnnnnnnnnnnnnnnnnnnnnnnnnnnnnnnnnnnnnnnnnnnnnnnnnnnnnnnnnnnnnnnnnnnnnnnnnnnnnnnnnnnnnnnnnnnnnnnnnnnnnnnnnnnnnnnnnnnnnnnnnnnnnnnnnnnnnnnnnnnnnnnnnnnnnnnnnnnnnnnnnnnnnnnnnnnnnnnnnnnnnnnnnnnnnnnnnnnnnnnnnnnnnnnnnnnnnnnnnnnnnnnnnnnnnnnnnnnnnnnnnnnnnnnnnnnnnnnnnnnnnnnnnnnnnnnnnnnnnnnnnnnnnnnnnnnnnnnnnnnnnnnnnnnnnnnnnnnnnnnnnnnnnnnnnnnnnnnnnnnnnnnnnnnnnnnnnnnnnnnnnnnnnnnnnnnnnnnnnnnnnnnnnnnnnnnnnnnnnnnnnnnnnnnnnnnnnnnnnnnnnnnnnnnnnnnnnnnnnnnnnnnnnnnnnnnnnnnnnnnnnnnnnnnnnnnnnnnnnnnnnnnnnnnnnnnnnnnnnnnnnnnnnnnnnnnnnnnnnnnnnnnnnnnnnnnnnnnnnnnnnnnnnnnnnnnnnnnnnnnnnnnnnnnnnnnnnnnnnnnnnnnnnnnnnnnnnnnnnnnnnnnnnnnnnnnnnnnnnnnnnnnnnnnnnnnnnnnnnnnnnnnnnnnnnnnnnnnnnnnnnnnnnnnnnnnnnnnnnnnnnnnnnnnnnnnnnnnnnnnnnnnnnnnnnnnnnnnnnnnnnnnnnnnnnnnnnnnnnnnnnnnnnnnnnnnnnnnnnnnnnnnnnnnnnnnnnnnnnnnnnnnnnnnnnnnnnnnnnnnnnnnnnnnnnnnnnnnnnnnnnnnnnnnnnnnnnnnnnnnnnnnnnnnnnnnnnnnnnnnnnnnnnnnnnnnnnnnnnnnnnnnnnnnnnnnnnnnnnnnnnnnnnnnnnnnnnnnnnnnnnnnnnnnnnnnnnnnnnnnnnnnnnnnnnnnnnnnnnnnnnnnnnnnnnnnnnnnnnnnnnnnnnnnnnnnnnnnnnnnnnnnnnnnnnnnnnnnnnnnnnnnnnnnnnnnnnnnnnnnnnnnnnnnnnnnnnnnnnnnnnnnnnnnnnnnnnnnnnnnnnnnnnnnnnnnnnnnnnnnnnnnnnnnnnnnnnnnnnnnnnnnnnnnnnnnnnnnnnnnnnnnnnnnnnnnnnnnnnnnnnnnnnnnnnnnnnnnnnnnnnnnnnnnnnnnnnnnnnnnnnnnnnnnnnnnnnnnnnnnnnnnnnnnnnnnnnnnnnnnnnnnnnnnnnnnnnnnnnnnnnnnnnnnnnnnnnnnnnnnnnnnnnnnnnnnnnnnnnnnnnnnnnnnnnnnnnnnnnnnnnnnnnnnnnnnnnnnnnnnnnnnnnnnnnnnnnnnnnnnnnnnnnnnnnnnnnnnnnnnnnnnnnnnnnnnnnnnnnnnnnnnnnnnnnnnnnnnnnnnnnnnnnnnnnnnnnnnnnnnnnnnnnnnnnnnnnnnnnnnnnnnnnnnnnnnnnnnnnnnnnnnnnnnnnnnnnnnnnnnnnnnnnnnnnnnnnnnnnnnnnnnnnnnnnnnnnnnnnnnnnnnnnnnnnnnnnnnnnnnnnnnnnnnnnnnnnnnnnnnnnnnnnnnnnnnnnnnnnnnnnnnnnnnnnnnnnnnnnnnnnnnnnnnnnnnnnnnnnnnnnnnnnnnnnnnnnnnnnnnnnnnnnnnnnnnnnnnnnnnnnnnnnnnnnnnnnnnnnnnnnnnnnnnnnnnnnnnnnnnnnnnnnnnnnnnnnnnnnnnnnnnnnnnnnnnnnnnnnnnnnnnnnnnnnnnnnnnnnnnnnnnnnnnnnnnnnnnnnnnnnnnnnnnnnnnnnnnnnnnnnnnnnnnnnnnnnnnnnnnnnnnnnnnnnnnnnnnnnnnnnnnnnnnnnnnnnnnnnnnnnnnnnnnnnnnnnnnnnnnnnnnnnnnnnnnnnnnnnnnnnnnnnnnnnnnnnnnnnnnnnnnnnnnnnnnnnnnnnnnnnnnnnnnnnnnnnnnnnnnnnnnnnnnnnnnnnnnnnnnnnnnnnnnnnnnnnnnnnnnnnnnnnnnnnnnnnnnnnnnnnnnnnnnnnnnnnnnnnnnnnnnnnnnnnnnnnnnnnnnnnnnnnnnnnnnnnnnnnnnnnnnnnnnnnnnnnnnnnnnnnnnnnnnnnnnnnnnnnnnnnnnnnnnnnnnnnnnnnnnnnnnnnnnnnnnnnnnnnnnnnnnnnnnnnnnnnnnnnnnnnnnnnnnnnnnnnnnnnnnnnnnnnnnnnnnnnnnnnnnnnnnnnnnnnnnnnnnnnnnnnnnnnnnnnnnnnnnnnnnnnnnnnnnnnnnnnnnnnnnnnnnnnnnnnnnnnnnnnnnnnnnnnnnnnnnnnnnnnnnnnnnnnnnnnnnnnnnnnnnnnnnnnnnnnnnnnnnnnnnnnnnnnnnnnnnnnnnnnnnnnnnnnnnnnnnnnnnnnnnnnnnnnnnnnnnnnnnnnnnnnnnnnnnnnnnnnnnnnnnnnnnnnnnnnnnnnnnnnnnnnnnnnnnnnnnnnnnnnnnnnnnnnnnnnnnnnnnnnnnnnnnnnnnnnnnnnnnnnnnnnnnnnnnnnnnnnnnnnnnnnnnnnnnnnnnnnnnnnnnnnnnnnnnnnnnnnnnnnnnnnnnnnnnnnnnnnnnnnnnnnnnnnnnnnnnnnnnnnnnnnnnnnnnnnnnnnnnnnnnnnnnnnnnnnnnnnnnnnnnnnnnnnnnnnnnnnnnnnnnnnnnnnnnnnnnnnnnnnnnnnnnnnnnnnnnnnnnnnnnnnnnnnnnnnnnnnnnnnnnnnnnnnnnnnnnnnnnnnnnnnnnnnnnnnnnnnnnnnnnnnnnnnnnnnnnnnnnnnnnnnnnnnnnnnnnnnnnnnnnnnnnnnnnnnnnnnnnnnnnnnnnnnnnnnnnnnnnnnnnnnnnnnnnnnnnnnnnnnnnnnnnnnnnnnnnnnnnnnnnnnnnnnnnnnnnnnnnnnnnnnnnnnnnnnnnnnnnnnnnnnnnnnnnnnnnnnnnnnnnnnnnnnnnnnnnnnnnnnnnnnnnnnnnnnnnnnnnnnnnnnnnnnnnnnnnnnnnnnnnnnnnnnnnnnnnnnnnnnnnnnnnnnnnnnnnnnnnnnnnnnnnnnnnnnnnnnnnnnnnnnnnnnnnnnnnnnnnnnnnnnnnnnnnnnnnnnnnnnnnnnnnnnnnnnnnnnnnnnnnnnnnnnnnnnnnnnnnnnnnnnnnnnnnnnnnnnnnnnnnnnnnnnnnnnnnnnnnnnnnnnnnnnnnnnnnnnnnnnnnnnnnnnnnnnnnnnnnnnnnnnnnnnnnnnnnnnnnnnnnnnnnnnnnnnnnnnnnnnnnnnnnnnnnnnnnnnnnnnnnnnnnnnnnnnnnnnnnnnnnnnnnnnnnnnnnnnnnnnnnnnnnnnnnnnnnnnnnnnnnnnnnnnnnnnnnnnnnnnnnnnnnnnnnnnnnnnnnnnnnnnnnnnnnnnnnnnnnnnnnnnnnnnnnnnnnnnnnnnnnnnnnnnnnnnnnnnnnnnnnnnnnnnnnnnnnnnnnnnnnnnnnnnnnnnnnnnnnnnnnnnnnnnnnnnnnnnnnnnnnnnnnnnnnnnnnnnnnnnnnnnnnnnnnnnnnnnnnnnnnnnnnnnnnnnnnnnnnnnnnnnnnnnnnnnnnnnnnnnnnnnnnnnnnnnnnnnnnnnnnnnnnnnnnnnnnnnnnnnnnnnnnnnnnnnnnnnnnnnnnnnnnnnnnnnnnnnnnnnnnnnnnnnnnnnnnnnnnnnnnnnnnnnnnnnnnnnnnnnnnnnnnnnnnnnnnnnnnnnnnnnnnnnnnnnnnnnnnnnnnnnnnnnnnnnnnnnnnnnnnnnnnnnnnnnnnnnnnnnnnnnnnnnnnnnnnnnnnnnnnnnnnnnnnnnnnnnnnnnnnnnnnnnnnnnnnnnnnnnnnnnnnnnnnnnnnnnnnnnnnnnnnnnnnnnnnnnnnnnnnnnnnnnnnnnnnnnnnnnnnnnnnnnnnnnnnnnnnnnnnnnnnnnnnnnnnnnnnnnnnnnnnnnnnnnnnnnnnnnnnnnnnnnnnnnnnnnnnnnnnnnnnnnnnnnnnnnnnnnnnnnnnnnnnnnnnnnnnnnnnnnnnnnnnnnnnnnnnnnnnnnnnnnnnnnnnnnnnnnnnnnnnnnnnnnnnnnnnnnnnnnnnnnnnnnnnnnnnnnnnnnnnnnnnnnnnnnnnnnnnnnnnnnnnnnnnnnnnnnnnnnnnnnnnnnnnnnnnnnnnnnnnnnnnnnnnnnnnnnnnnnnnnnnnnnnnnnnnnnnnnnnnnnnnnnnnnnnnnnnnnnnnnnnnnnnnnnnnnnnnnnnnnnnnnnnnnnnnnnnnnnnnnnnnnnnnnnnnnnnnnnnnnnnnnnnnnnnnnnnnnnnnnnnnnnnnnnnnnnnnnnnnnnnnnnnnnnnnnnnnnnnnnnnnnnnnnnnnnnnnnnnnnnnnnnnnnnnnnnnnnnnnnnnnnnnnnnnnnnnnnnnnnnnnnnnnnnnnnnnnnnnnnnnnnnnnnnnnnnnnnnnnnnnnnnnnnnnnnnnnnnnnnnnnnnnnnnnnnnnnnnnnnnnnnnnnnnnnnnnnnnnnnnnnnnnnnnnnnnnnnnnnnnnnnnnnnnnnnnnnnnnnnnnnnnnnnnnnnnnnnnnnnnnnnnnnnnnnnnnnnnnnnnnnnnnnnnnnnnnnnnnnnnnnnnnnnnnnnnnnnnnnnnnnnnnnnnnnnnnnnnnnnnnnnnnnnnnnnnnnnnnnnnnnnnnnnnnnnnnnnnnnnnnnnnnnnnnnnnnnnnnnnnnnnnnnnnnnnnnnnnnnnnnnnnnnnnnnnnnnnnnnnnnnnnnnnnnnnnnnnnnnnnnnnnnnnnnnnnnnnnnnnnnnnnnnnnnnnnnnnnnnnnnnnnnnnnnnnnnnnnnnnnnnnnnnnnnnnnnnnnnnnnnnnnnnnnnnnnnnnnnnnnnnnnnnnnnnnnnnnnnnnnnnnnnnnnnnnnnnnnnnnnnnnnnnnnnnnnnnnnnnnnnnnnnnnnnnnnnnnnnnnnnnnnnnnnnnnnnnnnnnnnnnnnnnnnnnnnnnnnnnnnnnnnnnnnnnnnnnnnnnnnnnnnnnnnnnnnnnnnnnnnnnnnnnnnnnnnnnnnnnnnnnnnnnnnnnnnnnnnnnnnnnnnnnnnnnnnnnnnnnnnnnnnnnnnnnnnnnnnnnnnnnnnnnnnnnnnnnnnnnnnnnnnnnnnnnnnnnnnnnnnnnnnnnnnnnnnnnnnnnnnnnnnnnnnnnnnnnnnnnnnnnnnnnnnnnnnnnnnnnnnnnnnnnnnnnnnnnnnnnnnnnnnnnnnnnnnnnnnnnnnnnnnnnnnnnnnnnnnnnnnnnnnnnnnnnnnnnnnnnnnnnnnnnnnnnnnnnnnnnnnnnnnnnnnnnnnnnnnnnnnnnnnnnnnnnnnnnnnnnnnnnnnnnnnnnnnnnnnnnnnnnnnnnnnnnnnnnnnnnnnnnnnnnnnnnnnnnnnnnnnnnnnnnnnnnnnnnnnnnnnnnnnnnnnnnnnnnnnnnnnnnnnnnnnnnnnnnnnnnnnnnnnnnnnnnnnnnnnnnnnnnnnnnnnnnnnnnnnnnnnnnnnnnnnnnnnnnnnnnnnnnnnnnnnnnnnnnnnnnnnnnnnnnnnnnnnnnnnnnnnnnnnnnnnnnnnnnnnnnnnnnnnnnnnnnnnnnnnnnnnnnnnnnnnnnnnnnnnnnnnnnnnnnnnnnnnnnnnnnnnnnnnnnnnnnnnnnnnnnnnnnnnnnnnnnnnnnnnnnnnnnnnnnnnnnnnnnnnnnnnnnnnnnnnnnnnnnnnnnnnnnnnnnnnnnnnnnnnnnnnnnnnnnnnnnnnnnnnnnnnnnnnnnnnnnnnnnnnnnnnnnnnnnnnnnnnnnnnnnnnnnnnnnnnnnnnnnnnnnnnnnnnnnnnnnnnnnnnnnnnnnnnnnnnnnnnnnnnnnnnnnnnnnnnnnnnnnnnnnnnnnnnnnnnnnnnnnnnnnnnnnnnnnnnnnnnnnnnnnnnnnnnnnnnnnnnnnnnnnnnnnnnnnnnnnnnnnnnnnnnnnnnnnnnnnnnnnnnnnnnnnnnnnnnnnnnnnnnnnnnnnnnnnnnnnnnnnnnnnnnnnnnnnnnnnnnnnnnnnnnnnnnnnnnnnnnnnnnnnnnnnnnnnnnnnnnnnnnnnnnnnnnnnnnnnnnnnnnnnnnnnnnnnnnnnnnnnnnnnnnnnnnnnnnnnnnnnnnnnnnnnnnnnnnnnnnnnnnnnnnnnnnnnnnnnnnnnnnnnnnnnnnnnnnnnnnnnnnnnnnnnnnnnnnnnnnnnnnnnnnnnnnnnnnnnnnnnnnnnnnnnnnnnnnnnnnnnnnnnnnnnnnnnnnnnnnnnnnnnnnnnnnnnnnnnnnnnnnnnnnnnnnnnnnnnnnnnnnnnnnnnnnnnnnnnnnnnnnnnnnnnnnnnnnnnnnnnnnnnnnnnnnnnnnnnnnnnnnnnnnnnnnnnnnnnnnnnnnnnnnnnnnnnnnnnnnnnnnnnnnnnnnnnnnnnnnnnnnnnnnnnnnnnnnnnnnnnnnnnnnnnnnnnnnnnnnnnnnnnnnnnnnnnnnnnnnnnnnnnnnnnnnnnnnnnnnnnnnnnnnnnnnnnnnnnnnnnnnnnnnnnnnnnnnnnnnnnnnnnnnnnnnnnnnnnnnnnnnnnnnnnnnnnnnnnnnnnnnnnnnnnnnnnnnnnnnnnnnnnnnnnnnnnnnnnnnnnnnnnnnnnnnnnnnnnnnnnnnnnnnnnnnnnnnnnnnnnnnnnnnnnnnnnnnnnnnnnnnnnnnnnnnnnnnnnnnnnnnnnnnnnnnnnnnnnnnnnnnnnnnnnnnnnnnnnnnnnnnnnnnnnnnnnnnnnnnnnnnnnnnnnnnnnnnnnnnnnnnnnnnnnnnnnnnnnnnnnnnnnnnnnnnnnnnnnnnnnnnnnnnnnnnnnnnnnnnnnnnnnnnnnnnnnnnnnnnnnnnnnnnnnnnnnnnnnnnnnnnnnnnnnnnnnnnnnnnnnnnnnnnnnnnnnnnnnnnnnnnnnnnnnnnnnnnnnnnnnnnnnnnnnnnnnnnnnnnnnnnnnnnnnnnnnnnnnnnnnnnnnnnnnnnnnnnnnnnnnnnnnnnnnnnnnnnnnnnnnnnnnnnnnnnnnnnnnnnnnnnnnnnnnnnnnnnnnnnnnnnnnnnnnnnnnnnnnnnnnnnnnnnnnnnnnnnnnnnnnnnnnnnnnnnnnnnnnnnnnnnnnnnnnnnnnnnnnnnnnnnnnnnnnnnnnnnnnnnnnnnnnnnnnnnnnnnnnnnnnnnnnnnnnnnnnnnnnnnnnnnnnnnnnnnnnnnnnnnnnnnnnnnnnnnnnnnnnnnnnnnnnnnnnnnnnnnnnnnnnnnnnnnnnnnnnnnnnnnnnnnnnnnnnnnnnnnnnnnnnnnnnnnnnnnnnnnnnnnnnnnnnnnnnnnnnnnnnnnnnnnnnnnnnnnnnnnnnnnnnnnnnnnnnnnnnnnnnnnnnnnnnnnnnnnnnnnnnnnnnnnnnnnnnnnnnnnnnnnnnnnnnnnnnnnnnnnnnnnnnnnnnnnnnnnnnnnnnnnnnnnnnnnnnnnnnnnnnnnnnnnnnnnnnnnnnnnnnnnnnnnnnnnnnnnnnnnnnnnnnnnnnnnnnnnnnnnnnnnnnnnnnnnnnnnnnnnnnnnnnnnnnnnnnnnnnnnnnnnnnnnnnnnnnnnnnnnnnnnnnnnnnnnnnnnnnnnnnnnnnnnnnnnnnnnnnnnnnnnnnnnnnnnnnnnnnnnnnnnnnnnnnnnnnnnnnnnnnnnnnnnnnnnnnnnnnnnnnnnnnnnnnnnnnnnnnnnnnnnnnnnnnnnnnnnnnnnnnnnnnnnnnnnnnnnnnnnnnnnnnnnnnnnnnnnnnnnnnnnnnnnnnnnnnnnnnnnnnnnnnnnnnnnnnnnnnnnnnnnnnnnnnnnnnnnnnnnnnnnnnnnnnnnnnnnnnnnnnnnnnnnnnnnnnnnnnnnnnnnnnnnnnnnnnnnnnnnnnnnnnnnnnnnnnnnnnnnnnnnnnnnnnnnnnnnnnnnnnnnnnnnnnnnnnnnnnnnnnnnnnnnnnnnnnnnnnnnnnnnnnnnnnnnnnnnnnnnnnnnnnnnnnnnnnnnnnnnnnnnnnnnnnnnnnnnnnnnnnnnnnnnnnnnnnnnnnnnnnnnnnnnnnnnnnnnnnnnnnnnnnnnnnnnnnnnnnnnnnnnnnnnnnnnnnnnnnnnnnnnnnnnnnnnnnnnnnnnnnnnnnnnnnnnnnnnnnnnnnnnnnnnnnnnnnnnnnnnnnnnnnnnnnnnnnnnnnnnnnnnnnnnnnnnnnnnnnnnnnnnnnnnnnnnnnnnnnnnnnnnnnnnnnnnnnnnnnnnnnnnnnnnnnnnnnnnnnnnnnnnnnnnnnnnnnnnnnnnnnnnnnnnnnnnnnnnnnnnnnnnnnnnnnnnnnnnnnnnnnnnnnnnnnnnnnnnnnnnnnnnnnnnnnnnnnnnnnnnnnnnnnnnnnnnnnnnnnnnnnnnnnnnnnnnnnnnnnnnnnnnnnnnnnnnnnnnnnnnnnnnnnnnnnnnnnnnnnnnnnnnnnnnnnnnnnnnnnnnnnnnnnnnnnnnnnnnnnnnnnnnnnnnnnnnnnnnnnnnnnnnnnnnnnnnnnnnnnnnnnnnnnnnnnnnnnnnnnnnnnnnnnnnnnnnnnnnnnnnnnnnnnnnnnnnnnnnnnnnnnnnnnnnnnnnnnnnnnnnnnnnnnnnnnnnnnnnnnnnnnnnnnnnnnnnnnnnnnnnnnnnnnnnnnnnnnnnnnnnnnnnnnnnnnnnnnnnnnnnnnnnnnnnnnnnnnnnnnnnnnnnnnnnnnnnnnnnnnnnnnnnnnnnnnnnnnnnnnnnnnnnnnnnnnnnnnnnnnnnnnnnnnnnnnnnnnnnnnnnnnnnnnnnnnnnnnnnnnnnnnnnnnnnnnnnnnnnnnnnnnnnnnnnnnnnnnnnnnnnnnnnnnnnnnnnnnnnnnnnnnnnnnnnnnnnnnnnnnnnnnnnnnnnnnnnnnnnnnnnnnnnnnnnnnnnnnnnnnnnnnnnnnnnnnnnnnnnnnnnnnnnnnnnnnnnnnnnnnnnnnnnnnnnnnnnnnnnnnnnnnnnnnnnnnnnnnnnnnnnnnnnnnnnnnnnnnnnnnnnnnnnnnnnnnnnnnnnnnnnnnnnnnnnnnnnnnnnnnnnnnnnnnnnnnnnnnnnnnnnnnnnnnnnnnnnnnnnnnnnnnnnnnnnnnnnnnnnnnnnnnnnnnnnnnnnnnnnnnnnnnnnnnnnnnnnnnnnnnnnnnnnnnnnnnnnnnnnnnnnnnnnnnnnnnnnnnnnnnnnnnnnnnnnnnnnnnnnnnnnnnnnnnnnnnnnnnnnnnnnnnnnnnnnnnnnnnnnnnnnnnnnnnnnnnnnnnnnnnnnnnnnnnnnnnnnnnnnnnnnnnnnnnnnnnnnnnnnnnnnnnnnnnnnnnnnnnnnnnnnnnnnnnnnnnnnnnnnnnnnnnnnnnnnnnnnnnnnnnnnnnnnnnnnnnnnnnnnnnnnnnnnnnnnnnnnnnnnnnnnnnnnnnnnnnnnnnnnnnnnnnnnnnnnnnnnnnnnnnnnnnnnnnnnnnnnnnnnnnnnnnnnnnnnnnnnnnnnnnnnnnnnnnnnnnnnnnnnnnnnnnnnnnnnnnnnnnnnnnnnnnnnnnnnnnnnnnnnnnnnnnnnnnnnnnnnnnnnnnnnnnnnnnnnnnnnnnnnnnnnnnnnnnnnnnnnnnnnnnnnnnnnnnnnnnnnnnnnnnnnnnnnnnnnnnnnnnnnnnnnnnnnnnnnnnnnnnnnnnnnnnnnnnnnnnnnnnnnnnnnnnnnnnnnnnnnnnnnnnnnnnnnnnnnnnnnnnnnnnnnnnnnnnnnnnnnnnnnnnnnnnnnnnnnnnnnnnnnnnnnnnnnnnnnnnnnnnnnnnnnnnnnnnnnnnnnnnnnnnnnnnnnnnnnnnnnnnnnnnnnnnnnnnnnnnnnnnnnnnnnnnnnnnnnnnnnnnnnnnnnnnnnnnnnnnnnnnnnnnnnnnnnnnnnnnnnnnnnnnnnnnnnnnnnnnnnnnnnnnnnnnnnnnnnnnnnnnnnnnnnnnnnnnnnnnnnnnnnnnnnnnnnnnnnnnnnnnnnnnnnnnnnnnnnnnnnnnnnnnnnnnnnnnnnnnnnnnnnnnnnnnnnnnnnnnnnnnnnnnnnnnnnnnnnnnnnnnnnnnnnnnnnnnnnnnnnnnnnnnnnnnnnnnnnnnnnnnnnnnnnnnnnnnnnnnnnnnnnnnnnnnnnnnnnnnnnnnnnnnnnnnnnnnnnnnnnnnnnnnnnnnnnnnnnnnnnnnnnnnnnnnnnnnnnnnnnnnnnnnnnnnnnnnnnnnnnnnnnnnnnnnnnnnnnnnnnnnnnnnnnnnnnnnnnnnnnnnnnnnnnnnnnnnnnnnnnnnnnnnnnnnnnnnnnnnnnnnnnnnnnnnnnnnnnnnnnnnnnnnnnnnnnnnnnnnnnnnnnnnnnnnnnnnnnnnnnnnnnnnnnnnnnnnnnnnnnnnnnnnnnnnnnnnnnnnnnnnnnnnnnnnnnnnnnnnnnnnnnnnnnnnnnnnnnnnnnnnnnnnnnnnnnnnnnnnnnnnnnnnnnnnnnnnnnnnnnnnnnnnnnnnnnnnnnnnnnnnnnnnnnnnnnnnnnnnnnnnnnnnnnnnnnnnnnnnnnnnnnnnnnnnnnnnnnnnnnnnnnnnnnnnnnnnnnnnnnnnnnnnnnnnnnnnnnnnnnnnnnnnnnnnnnnnnnnnnnnnnnnnnnnnnnnnnnnnnnnnnnnnnnnnnnnnnnnnnnnnnnnnnnnnnnnnnnnnnnnnnnnnnnnnnnnnnnnnnnnnnnnnnnnnnnnnnnnnnnnnnnnnnnnnnnnnnnnnnnnnnnnnnnnnnnnnnnnnnnnnnnnnnnnnnnnnnnnnnnnnnnnnnnnnnnnnnnnnnnnnnnnnnnnnnnnnnnnnnnnnnnnnnnnnnnnnnnnnnnnnnnnnnnnnnnnnnnnnnnnnnnnnnnnnnnnnnnnnnnnnnnnnnnnnnnnnnnnnnnnnnnnnnnnnnnnnnnnnnnnnnnnnnnnnnnnnnnnnnnnnnnnnnnnnnnnnnnnnnnnnnnnnnnnnnnnnnnnnnnnnnnnnnnnnnnnnnnnnnnnnnnnnnnnnnnnnnnnnnnnnnnnnnnnnnnnnnnnnnnnnnnnnnnnnnnnnnnnnnnnnnnnnnnnnnnnnnnnnnnnnnnnnnnnnnnnnnnnnnnnnnnnnnnnnnnnnnnnnnnnnnnnnnnnnnnnnnnnnnnnnnnnnnnnnnnnnnnnnnnnnnnnnnnnnnnnnnnnnnnnnnnnnnnnnnnnnnnnnnnnnnnnnnnnnnnnnnnnnnnnnnnnnnnnnnnnnnnnnnnnnnnnnnnnnnnnnnnnnnnnnnnnnnnnnnnnnnnnnnnnnnnnnnnnnnnnnnnnnnnnnnnnnnnnnnnnnnnnnnnnnnnnnnnnnnnnnnnnnnnnnnnnnnnnnnnnnnnnnnnnnnnnnnnnnnnnnnnnnnnnnnnnnnnnnnnnnnnnnnnnnnnnnnnnnnnnnnnnnnnnnnnnnnnnnnnnnnnnnnnnnnnnnnnnnnnnnnnnnnnnnnnnnnnnnnnnnnnnnnnnnnnnnnnnnnnnnnnnnnnnnnnnnnnnnnnnnnnnnnnnnnnnnnnnnnnnnnnnnnnnnnnnnnnnnnnnnnnnnnnnnnnnnnnnnnnnnnnnnnnnnnnnnnnnnnnnnnnnnnnnnnnnnnnnnnnnnnnnnnnnnnnnnnnnnnnnnnnnnnnnnnnnnnnnnnnnnnnnnnnnnnnnnnnnnnnnnnnnnnnnnnnnnnnnnnnnnnnnnnnnnnnnnnnnnnnnnnnnnnnnnnnnnnnnnnnnnnnnnnnnnnnnnnnnnnnnnnnnnnnnnnnnnnnnnnnnnnnnnnnnnnnnnnnnnnnnnnnnnnnnnnnnnnnnnnnnnnnnnnnnnnnnnnnnnnnnnnnnnnnnnnnnnnnnnnnnnnnnnnnnnnnnnnnnnnnnnnnnnnnnnnnnnnnnnnnnnnnnnnnnnnnnnnnnnnnnnnnnnnnnnnnnnnnnnnnnnnnnnnnnnnnnnnnnnnnnnnnnnnnnnnnnnnnnnnnnnnnnnnnnnnnnnnnnnnnnnnnnnnnnnnnnnnnnnnnnnnnnnnnnnnnnnnnnnnnnnnnnnnnnnnnnnnnnnnnnnnnnnnnnnnnnnnnnnnnnnnnnnnnnnnnnnnnnnnnnnnnnnnnnnnnnnnnnnnnnnnnnnnnnnnnnnnnnnnnnnnnnnnnnnnnnnnnnnnnnnnnnnnnnnnnnnnnnnnnnnnnnnnnnnnnnnnnnnnnnnnnnnnnnnnnnnnnnnnnnnnnnnnnnnnnnnnnnnnnnnnnnnnnnnnnnnnnnnnnnnnnnnnnnnnnnnnnnnnnnnnnnnnnnnnnnnnnnnnnnnnnnnnnnnnnnnnnnnnnnnnnnnnnnnnnnnnnnnnnnnnnnnnnnnnnnnnnnnnnnnnnnnnnnnnnnnnnnnnnnnnnnnnnnnnnnnnnnnnnnnnnnnnnnnnnnnnnnnnnnnnnnnnnnnnnnnnnnnnnnnnnnnnnnnnnnnnnnnnnnnnnnnnnnnnnnnnnnnnnnnnnnnnnnnnnnnnnnnnnnnnnnnnnnnnnnnnnnnnnnnnnnnnnnnnnnnnnnnnnnnnnnnnnnnnnnnnnnnnnnnnnnnnnnnnnnnnnnnnnnnnnnnnnnnnnnnnnnnnnnnnnnnnnnnnnnnnnnnnnnnnnnnnnnnnnnnnnnnnnnnnnnnnnnnnnnnnnnnnnnnnnnnnnnnnnnnnnnnnnnnnnnnnnnnnnnnnnnnnnnnnnnnnnnnnnnnnnnnnnnnnnnnnnnnnnnnnnnnnnnnnnnnnnnnnnnnnnnnnnnnnnnnnnnnnnnnnnnnnnnnnnnnnnnnnnnnnnnnnnnnnnnnnnnnnnnnnnnnnnnnnnnnnnnnnnnnnnnnnnnnnnnnnnnnnnnnnnnnnnnnnnnnnnnnnnnnnnnnnnnnnnnnnnnnnnnnnnnnnnnnnnnnnnnnnnnnnnnnnnnnnnnnnnnnnnnnnnnnnnnnnnnnnnnnnnnnnnnnnnnnnnnnnnnnnnnnnnnnnnnnnnnnnnnnnnnnnnnnnnnnnnnnnnnnnnnnnnnnnnnnnnnnnnnnnnnnnnnnnnnnnnnnnnnnnnnnnnnnnnnnnnnnnnnnnnnnnnnnnnnnnnnnnnnnnnnnnnnnnnnnnnnnnnnnnnnnnnnnnnnnnnnnnnnnnnnnnnnnnnnnnnnnnnnnnnnnnnnnnnnnnnnnnnnnnnnnnnnnnnnnnnnnnnnnnnnnnnnnnnnnnnnnnnnnnnnnnnnnnnnnnnnnnnnnnnnnnnnnnnnnnnnnnnnnnnnnnnnnnnnnnnnnnnnnnnnnnnnnnnnnnnnnnnnnnnnnnnnnnnnnnnnnnnnnnnnnnnnnnnnnnnnnnnnnnnnnnnnnnnnnnnnnnnnnnnnnnnnnnnnnnnnnnnnnnnnnnnnnnnnnnnnnnnnnnnnnnnnnnnnnnnnnnnnnnnnnnnnnnnnnnnnnnnnnnnnnnnnnnnnnnnnnnnnnnnnnnnnnnnnnnnnnnnnnnnnnnnnnnnnnnnnnnnnnnnnnnnnnnnnnnnnnnnnnnnnnnnnnnnnnnnnnnnnnnnnnnnnnnnnnnnnnnnnnnnnnnnnnnnnnnnnnnnnnnnnnnnnnnnnnnnnnnnnnnnnnnnnnnnnnnnnnnnnnnnnnnnnnnnnnnnnnnnnnnnnnnnnnnnnnnnnnnnnnnnnnnnnnnnnnnnnnnnnnnnnnnnnnnnnnnnnnnnnnnnnnnnnnnnnnnnnnnnnnnnnnnnnnnnnnnnnnnnnnnnnnnnnnnnnnnnnnnnnnnnnnnnnnnnnnnnnnnnnnnnnnnnnnnnnnnnnnnnnnnnnnnnnnnnnnnnnnnnnnnnnnnnnnnnnnnnnnnnnnnnnnnnnnnnnnnnnnnnnnnnnnnnnnnnnnnnnnnnnnnnnnnnnnnnnnnnnnnnnnnnnnnnnnnnnnnnnnnnnnnnnnnnnnnnnnnnnnnnnnnnnnnnnnnnnnnnnnnnnnnnnnnnnnnnnnnnnnnnnnnnnnnnnnnnnnnnnnnnnnnnnnnnnnnnnnnnnnnnnnnnnnnnnnnnnnnnnnnnnnnnnnnnnnnnnnnnnnnnnnnnnnnnnnnnnnnnnnnnnnnnnnnnnnnnnnnnnnnnnnnnnnnnnnnnnnnnnnnnnnnnnnnnnnnnnnnnnnnnnnnnnnnnnnnnnnnnnnnnnnnnnnnnnnnnnnnnnnnnnnnnnnnnnnnnnnnnnnnnnnnnnnnnnnnnnnnnnnnnnnnnnnnnnnnnnnnnnnnnnnnnnnnnnnnnnnnnnnnnnnnnnnnnnnnnnnnnnnnnnnnnnnnnnnnnnnnnnnnnnnnnnnnnnnnnnnnnnnnnnnnnnnnnnnnnnnnnnnnnnnnnnnnnnnnnnnnnnnnnnnnnnnnnnnnnnnnnnnnnnnnnnnnnnnnnnnnnnnnnnnnnnnnnnnnnnnnnnnnnnnnnnnnnnnnnnnnnnnnnnnnnnnnnnnnnnnnnnnnnnnnnnnnnnnnnnnnnnnnnnnnnnnnnnnnnnnnnnnnnnnnnnnnnnnnnnnnnnnnnnnnnnnnnnnnnnnnnnnnnnnnnnnnnnnnnnnnnnnnnnnnnnnnnnnnnnnnnnnnnnnnnnnnnnnnnnnnnnnnnnnnnnnnnnnnnnnnnnnnnnnnnnnnnnnnnnnnnnnnnnnnnnnnnnnnnnnnnnnnnnnnnnnnnnnnnnnnnnnnnnnnnnnnnnnnnnnnnnnnnnnnnnnnnnnnnnnnnnnnnnnnnnnnnnnnnnnnnnnnnnnnnnnnnnnnnnnnnnnnnnnnnnnnnnnnnnnnnnnnnnnnnnnnnnnnnnnnnnnnnnnnnnnnnnnnnnnnnnnnnnnnnnnnnnnnnnnnnnnnnnnnnnnnnnnnnnnnnnnnnnnnnnnnnnnnnnnnnnnnnnnnnnnnnnnnnnnnnnnnnnnnnnnnnnnnnnnnnnnnnnnnnnnnnnnnnnnnnnnnnnnnnnnnnnnnnnnnnnnnnnnnnnnnnnnnnnnnnnnnnnnnnnnnnnnnnnnnnnnnnnnnnnnnnnnnnnnnnnnnnnnnnnnnnnnnnnnnnnnnnnnnnnnnnnnnnnnnnnnnnnnnnnnnnnnnnnnnnnnnnnnnnnnnnnnnnnnnnnnnnnnnnnnnnnnnnnnnnnnnnnnnnnnnnnnnnnnnnnnnnnnnnnnnnnnnnnnnnnnnnnnnnnnnnnnnnnnnnnnnnnnnnnnnnnnnnnnnnnnnnnnnnnnnnnnnnnnnnnnnnnnnnnnnnnnnnnnnnnnnnnnnnnnnnnnnnnnnnnnnnnnnnnnnnnnnnnnnnnnnnnnnnnnnnnnnnnnnnnnnnnnnnnnnnnnnnnnnnnnnnnnnnnnnnnnnnnnnnnnnnnnnnnnnnnnnnnnnnnnnnnnnnnnnnnnnnnnnnnnnnnnnnnnnnnnnnnnnnnnnnnnnnnnnnnnnnnnnnnnnnnnnnnnnnnnnnnnnnnnnnnnnnnnnnnnnnnnnnnnnnnnnnnnnnnnnnnnnnnnnnnnnnnnnnnnnnnnnnnnnnnnnnnnnnnnnnnnnnnnnnnnnnnnnnnnnnnnnnnnnnnnnnnnnnnnnnnnnnnnnnnnnnnnnnnnnnnnnnnnnnnnnnnnnnnnnnnnnnnnnnnnnnnnnnnnnnnnnnnnnnnnnnnnnnnnnnnnnnnnnnnnnnnnnnnnnnnnnnnnnnnnnnnnnnnnnnnnnnnnnnnnnnnnnnnnnnnnnnnnnnnnnnnnnnnnnnnnnnnnnnnnnnnnnnnnnnnnnnnnnnnnnnnnnnnnnnnnnnnnnnnnnnnnnnnnnnnnnnnnnnnnnnnnnnnnnnnnnnnnnnnnnnnnnnnnnnnnnnnnnnnnnnnnnnnnnnnnnnnnnnnnnnnnnnnnnnnnnnnnnnnnnnnnnnnnnnnnnnnnnnnnnnnnnnnnnnnnnnnnnnnnnnnnnnnnnnnnnnnnnnnnnnnnnnnnnnnnnnnnnnnnnnnnnnnnnnnnnnnnnnnnnnnnnnnnnnnnnnnnnnnnnnnnnnnnnnnnnnnnnnnnnnnnnnnnnnnnnnnnnnnnnnnnnnnnnnnnnnnnnnnnnnnnnnnnnnnnnnnnnnnnnnnnnnnnnnnnnnnnnnnnnnnnnnnnnnnnnnnnnnnnnnnnnnnnnnnnnnnnnnnnnnnnnnnnnnnnnnnnnnnnnnnnnnnnnnnnnnnnnnnnnnnnnnnnnnnnnnnnnnnnnnnnnnnnnnnnnnnnnnnnnnnnnnnnnnnnnnnnnnnnnnnnnnnnnnnnnnnnnnnnnnnnnnnnnnnnnnnnnnnnnnnnnnnnnnnnnnnnnnnnnnnnnnnnnnnnnnnnnnnnnnnnnnnnnnnnnnnnnnnnnnnnnnnnnnnnnnnnnnnnnnnnnnnnnnnnnnnnnnnnnnnnnnnnnnnnnnnnnnnnnnnnnnnnnnnnnnnnnnnnnnnnnnnnnnnnnnnnnnnnnnnnnnnnnnnnnnnnnnnnnnnnnnnnnnnnnnnnnnnnnnnnnnnnnnnnnnnnnnnnnnnnnnnnnnnnnnnnnnnnnnnnnnnnnnnnnnnnnnnnnnnnnnnnnnnnnnnnnnnnnnnnnnnnnnnnnnnnnnnnnnnnnnnnnnnnnnnnnnnnnnnnnnnnnnnnnnnnnnnnnnnnnnnnnnnnnnnnnnnnnnnnnnnnnnnnnnnnnnnnnnnnnnnnnnnnnnnnnnnnnnnnnnnnnnnnnnnnnnnnnnnnnnnnnnnnnnnnnnnnnnnnnnnnnnnnnnnnnnnnnnnnnnnnnnnnnnnnnnnnnnnnnnnnnnnnnnnnnnnnnnnnnnnnnnnnnnnnnnnnnnnnnnnnnnnnnnnnnnnnnnnnnnnnnnnnnnnnnnnnnnnnnnnnnnnnnnnnnnnnnnnnnnnnnnnnnnnnnnnnnnnnnnnnnnnnnnnnnnnnnnnnnnnnnnnnnnnnnnnnnnnnnnnnnnnnnnnnnnnnnnnnnnnnnnnnnnnnnnnnnnnnnnnnnnnnnnnnnnnnnnnnnnnnnnnnnnnnnnnnnnnnnnnnnnnnnnnnnnnnnnnnnnnnnnnnnnnnnnnnnnnnnnnnnnnnnnnnnnnnnnnnnnnnnnnnnnnnnnnnnnnnnnnnnnnnnnnnnnnnnnnnnnnnnnnnnnnnnnnnnnnnnnnnnnnnnnnnnnnnnnnnnnnnnnnnnnnnnnnnnnnnnnnnnnnnnnnnnnnnnnnnnnnnnnnnnnnnnnnnnnnnnnnnnnnnnnnnnnnnnnnnnnnnnnnnnnnnnnnnnnnnnnnnnnnnnnnnnnnnnnnnnnnnnnnnnnnnnnnnnnnnnnnnnnnnnnnnnnnnnnnnnnnnnnnnnnnnnnnnnnnnnnnnnnnnnnnnnnnnnnnnnnnnnnnnnnnnnnnnnnnnnnnnnnnnnnnnnnnnnnnnnnnnnnnnnnnnnnnnnnnnnnnnnnnnnnnnnnnnnnnnnnnnnnnnnnnnnnnnnnnnnnnnnnnnnnnnnnnnnnnnnnnnnnnnnnnnnnnnnnnnnnnnnnnnnnnnnnnnnnnnnnnnnnnnnnnnnnnnnnnnnnnnnnnnnnnnnnnnnnnnnnnnnnnnnnnnnnnnnnnnnnnnnnnnnnnnnnnnnnnnnnnnnnnnnnnnnnnnnnnnnnnnnnnnnnnnnnnnnnnnnnnnnnnnnnnnnnnnnnnnnnnnnnnnnnnnnnnnnnnnnnnnnnnnnnnnnnnnnnnnnnnnnnnnnnnnnnnnnnnnnnnnnnnnnnnnnnnnnnnnnnnnnnnnnnnnnnnnnnnnnnnnnnnnnnnnnnnnnnnnnnnnnnnnnnnnnnnnnnnnnnnnnnnnnnnnnnnnnnnnnnnnnnnnnnnnnnnnnnnnnnnnnnnnnnnnnnnnnnnnnnnnnnnnnnnnnnnnnnnnnnnnnnnnnnnnnnnnnnnnnnnnnnnnnnnnnnnnnnnnnnnnnnnnnnnnnnnnnnnnnnnnnnnnnnnnnnnnnnnnnnnnnnnnnnnnnnnnnnnnnnnnnnnnnnnnnnnnnnnnnnnnnnnnnnnnnnnnnnnnnnnnnnnnnnnnnnnnnnnnnnnnnnnnnnnnnnnnnnnnnnnnnnnnnnnnnnnnnnnnnnnnnnnnnnnnnnnnnnnnnnnnnnnnnnnnnnnnnnnnnnnnnnnnnnnnnnnnnnnnnnnnnnnnnnnnnnnnnnnnnnnnnnnnnnnnnnnnnnnnnnnnnnnnnnnnnnnnnnnnnnnnnnnnnnnnnnnnnnnnnnnnnnnnnnnnnnnnnnnnnnnnnnnnnnnnnnnnnnnnnnnnnnnnnnnnnnnnnnnnnnnnnnnnnnnnnnnnnnnnnnnnnnnnnnnnnnnnnnnnnnnnnnnnnnnnnnnnnnnnnnnnnnnnnnnnnnnnnnnnnnnnnnnnnnnnnnnnnnnnnnnnnnnnnnnnnnnnnnnnnnnnnnnnnnnnnnnnnnnnnnnnnnnnnnnnnnnnnnnnnnnnnnnnnnnnnnnnnnnnnnnnnnnnnnnnnnnnnnnnnnnnnnnnnnnnnnnnnnnnnnnnnnnnnnnnnnnnnnnnnnnnnnnnnnnnnnnnnnnnnnnnnnnnnnnnnnnnnnnnnnnnnnnnnnnnnnnnnnnnnnnnnnnnnnnnnnnnnnnnnnnnnnnnnnnnnnnnnnnnnnnnnnnnnnnnnnnnnnnnnnnnnnnnnnnnnnnnnnnnnnnnnnnnnnnnnnnnnnnnnnnnnnnnnnnnnnnnnnnnnnnnnnnnnnnnnnnnnnnnnnnnnnnnnnnnnnnnnnnnnnnnnnnnnnnnnnnnnnnnnnnnnnnnnnnnnnnnnnnnnnnnnnnnnnnnnnnnnnnnnnnnnnnnnnnnnnnnnnnnnnnnnnnnnnnnnnnnnnnnnnnnnnnnnnnnnnnnnnnnnnnnnnnnnnnnnnnnnnnnnnnnnnnnnnnnnnnnnnnnnnnnnnnnnnnnnnnnnnnnnnnnnnnnnnnnnnnnnnnnnnnnnnnnnnnnnnnnnnnnnnnnnnnnnnnnnnnnnnnnnnnnnnnnnnnnnnnnnnnnnnnnnnnnnnnnnnnnnnnnnnnnnnnnnnnnnnnnnnnnnnnnnnnnnnnnnnnnnnnnnnnnnnnnnnnnnnnnnnnnnnnnnnnnnnnnnnnnnnnnnnnnnnnnnnnnnnnnnnnnnnnnnnnnnnnnnnnnnnnnnnnnnnnnnnnnnnnnnnnnnnnnnnnnnnnnnnnnnnnnnnnnnnnnnnnnnnnnnnnnnnnnnnnnnnnnnnnnnnnnnnnnnnnnnnnnnnnnnnnnnnnnnnnnnnnnnnnnnnnnnnnnnnnnnnnnnnnnnnnnnnnnnnnnnnnnnnnnnnnnnnnnnnnnnnnnnnnnnnnnnnnnnnnnnnnnnnnnnnnnnnnnnnnnnnnnnnnnnnnnnnnnnnnnnnnnnnnnnnnnnnnnnnnnnnnnnnnnnnnnnnnnnnnnnnnnnnnnnnnnnnnnnnnnnnnnnnnnnnnnnnnnnnnnnnnnnnnnnnnnnnnnnnnnnnnnnnnnnnnnnnnnnnnnnnnnnnnnnnnnnnnnnnnnnnnnnnnnnnnnnnnnnnnnnnnnnnnnnnnnnnnnnnnnnnnnnnnnnnnnnnnnnnnnnnnnnnnnnnnnnnnnnnnnnnnnnnnnnnnnnnnnnnnnnnnnnnnnnnnnnnnnnnnnnnnnnnnnnnnnnnnnnnnnnnnnnnnnnnnnnnnnnnnnnnnnnnnnnnnnnnnnnnnnnnnnnnnnnnnnnnnnnnnnnnnnnnnnnnnnnnnnnnnnnnnnnnnnnnnnnnnnnnnnnnnnnnnnnnnnnnnnnnnnnnnnnnnnnnnnnnnnnnnnnnnnnnnnnnnnnnnnnnnnnnnnnnnnnnnnnnnnnnnnnnnnnnnnnnnnnnnnnnnnnnnnnnnnnnnnnnnnnnnnnnnnnnnnnnnnnnnnnnnnnnnnnnnnnnnnnnnnnnnnnnnnnnnnnnnnnnnnnnnnnnnnnnnnnnnnnnnnnnnnnnnnnnnnnnnnnnnnnnnnnnnnnnnnnnnnnnnnnnnnnnnnnnnnnnnnnnnnnnnnnnnnnnnnnnnnnnnnnnnnnnnnnnnnnnnnnnnnnnnnnnnnnnnnnnnnnnnnnnnnnnnnnnnnnnnnnnnnnnnnnnnnnnnnnnnnnnnnnnnnnnnnnnnnnnnnnnnnnnnnnnnnnnnnnnnnnnnnnnnnnnnnnnnnnnnnnnnnnnnnnnnnnnnnnnnnnnnnnnnnnnnnnnnnnnnnnnnnnnnnnnnnnnnnnnnnnnnnnnnnnnnnnnnnnnnnnnnnnnnnnnnnnnnnnnnnnnnnnnnnnnnnnnnnnnnnnnnnnnnnnnnnnnnnnnnnnnnnnnnnnnnnnnnnnnnnnnnnnnnnnnnnnnnnnnnnnnnnnnnnnnnnnnnnnnnnnnnnnnnnnnnnnnnnnnnnnnnnnnnnnnnnnnnnnnnnnnnnnnnnnnnnnnnnnnnnnnnnnnnnnnnnnnnnnnnnnnnnnnnnnnnnnnnnnnnnnnnnnnnnnnnnnnnnnnnnnnnnnnnnnnnnnnnnnnnnnnnnnnnnnnnnnnnnnnnnnnnnnnnnnnnnnnnnnnnnnnnnnnnnnnnnnnnnnnnnnnnnnnnnnnnnnnnnnnnnnnnnnnnnnnnnnnnnnnnnnnnnnnnnnnnnnnnnnnnnnnnnnnnnnnnnnnnnnnnnnnnnnnnnnnnnnnnnnnnnnnnnnnnnnnnnnnnnnnnnnnnnnnnnnnnnnnnnnnnnnnnnnnnnnnnnnnnnnnnnnnnnnnnnnnnnnnnnnnnnnnnnnnnnnnnnnnnnnnnnnnnnnnnnnnnnnnnnnnnnnnnnnnnnnnnnnnnnnnnnnnnnnnnnnnnnnnnnnnnnnnnnnnnnnnnnnnnnnnnnnnnnnnnnnnnnnnnnnnnnnnnnnnnnnnnnnnnnnnnnnnnnnnnnnnnnnnnnnnnnnnnnnnnnnnnnnnnnnnnnnnnnnnnnnnnnnnnnnnnnnnnnnnnnnnnnnnnnnnnnnnnnnnnnnnnnnnnnnnnnnnnnnnnnnnnnnnnnnnnnnnnnnnnnnnnnnnnnnnnnnnnnnnnnnnnnnnnnnnnnnnnnnnnnnnnnnnnnnnnnnnnnnnnnnnnnnnnnnnnnnnnnnnnnnnnnnnnnnnnnnnnnnnnnnnnnnnnnnnnnnnnnnnnnnnnnnnnnnnnnnnnnnnnnnnnnnnnnnnnnnnnnnnnnnnnnnnnnnnnnnnnnnnnnnnnnnnnnnnnnnnnnnnnnnnnnnnnnnnnnnnnnnnnnnnnnnnnnnnnnnnnnnnnnnnnnnnnnnnnnnnnnnnnnnnnnnnnnnnnnnnnnnnnnnnnnnnnnnnnnnnnnnnnnnnnnnnnnnnnnnnnnnnnnnnnnnnnnnnnnnnnnnnnnnnnnnnnnnnnnnnnnnnnnnnnnnnnnnnnnnncgtcagccgtcgcgcatccgtctcgctcatgctccaatagtatcctgtcgacctcggtctgtctatactattatgagactattagtaatgtggccgatgctcgccgaccgcggacttgcaccccaagttgccgatgcaacctcgcgccaatatggtcttttctccgacgtcgggacttcgacgcctcccgtgagtgtctgcctgtacgtgaactcacacataactccagttatggcgtgcaaacgttgagcacattgcaggtgactagaaggtgggtgacatttcggttttcacgcgactcgtaacggctcgagcctctgcgaccatcagtcacatcatgcgtcaactgcgcgcaatctcgcgctcttcttagcgatgtggcagtagccgtcttcgcctgactcccgggatacggcggcggccatcgccgttgaactcaagggtgtctcactgccgggtgaggcgtttgactcggacacgagtcacacaagcgcgatgtatccagaagggattgacaacgtggactatctgaaccgctatggctggaacagccaaggttcagcacaccggcgctcaattccctgcgatgtcgcaaagaaacaagcgccacgcacagtaccgacgcgtttgtagttcagggttgttccaggcctcccggcggccttccgctcagcggctagacagtgccgtcctcgtgcctttgagagtgcgcacggagtatctgcctttgatgcgccacacgtgatctgatgcgcctgccgaacaacagatagactgagccgtagaacaccagagccagaatgatgactgctgtcgtggtcaattgcccttacctccgtacgctcatggtagctcgtgtctcaagccggcgccaaaccgtggctgctgccacatggagctatagctggctgagcggaaatgagcgctactggcgaacagaagcgcgaatcggacagcgcgggcagatgtccgagccgccacccggatgcgggtgtcgtgcagcaacagtgtcgcagggccgtgcacgcatgagctgcaccgtgattcgctgtcatgaggcacgaatcgaactcgaacgcgggcgcagacccgatggttaacactcttctctgtggcgcatgacgccagtcacgtagtggctgggccgccgtcggtcagctcgagttgctgtcgcacggcctccctcagtgcgtgcaggcggtcctggctctcgcgacgcttcgcacgttcgaccgcagcgtcagtcttcttcgacttcttccctcgttttccgcgcccctggccggtctccgtgtcctcgtccagcccgtagtactccgtcaggctgactccaataagcagcgcggccgcatcgccgatagtcatgctgtggtagctcgcgaacaggaacagggccgcatgcgttcctatcggcaccttcacctgctttctcacacggtcaaagtgcagtcctgtgattcctggcgtcggtccctccccgacaaaatcgagaatgctgtccctgatgagcttcgctgccgcatcgccgaatgtcatgttgtgtgccgcggcgaacgcgtagagcatcttgtaggcagtctccggtatcttgatttgcttcacatcttcacgcggcctgccccttttcggccgcattatggttctgttctgcatcactgggtctcctcgcgttgatgtttccgtgcgttgacgcgcacttcaccacgatttcgtgtcacattgagtggcatttgttcgtaagtcgacgagttgtcgactctggcattgtagccaatcgcaacgtgaatgtcacatgaaacgcctggatgcacccgcgcggcggtctgcacacacaggaatggccatgagtacatcgatttcggcgcgtgaatgctgcgcaaccgcaccgaaagaactggtagtcgtgacgcagaccagtgaaatccctgtcccgcggtgtggccacggcccacagagggacgtgaaccgccgcagactggcacagaagtgttctactctaagcgaatactgagacagatacgcacgctggtcaccactgtgcacatctcagtgttgttctcgcggcgattagtgtccctactacggtgaacacgaacttccgaccgttggtgagagtcatctatgatgccgtgtgcgggacggactcctgtcgacaccctacagaaccggctgataatcgcatgcgatttcccgtcgcacgtttaacatggcctcgacagacctttcgcgcgtcgggtaccttagccctagccccaggtatccaagcagcgacaaagggtcagtcttcttagaggaagtgtcaggccgagttccaggaccgaaaggttgagggacaagtaaggcaggagtactccggaggctgagtcgaaatagaaactgtgaggacgcttggggctcttctttgtctccgcacgaccgacttccacgagcaccgccgccttgatcgcagtgcagaggttcagggggcggccgttgccatgcaagtacgtgtttgcagcaacgagactctaaacggcactagtatcaacggcgggtaagatcacgccgactcctgagcggaaccctcccttcatagcttgtccgcatctgtggggccacctcactggataccatccggtgtcagcgataatcgggcaatccgttagctgtccgttagctgtggccatgcctccagcaatcacatgaaacaccggggcgcgtcccggaacgcagaccgtgcaacagagcaaaccgagctacctgcccatggagtacaattaggatcgtggtcatgtttctagatagcttctggcggctcggaagagggcagcgggatgaagcgtggcgccgcgtttgccctctggccacgaagcactccgtcagtaacctgaacccggactatcccagttctttgacttgaactctatcgggcaggagatgattgagtgggcaggctgatattccatgaggatggtggagtgactctggatgagcctgaggccggcgccggatatatgccgtacgccgatctccgaaagtccaggcccagcaagtccgcagaatctgagccagttgactcagccgatgccaagccgcgcgtgggcaggcagtcgggcagggaagcacttcccgccgatcaagcgaatacggaagaagcttacgcgtgtcattggccgaggcgctgactgacatcgagtgaagtggctcccctccttctgtcccgttccagagaacaactccacgtagaaccccagtccgaatcactgagtcctcctcagttcagtgtggaaccctccccagagagaagagtctcgttcgccagtccatccggccccacgaccagttcccaagcaacaagttcaaggtcgcgaacagacggttcgcggctgggcggacgctggatgcggcggtcaatgcctggcagttttgagattgcgcagtgcatctagcagctggcccagcggagcattgggcttcaattgatttacgacccgcactgggtctcgcattgcgcgccgcttcaatacatctgagggaagcggctgtcgcatccgttgctccagccaatctcgcagttcggcgtccgccggcaacgccaatccctgcacgcaattgcgctcatgtgtacaggtctagcttacggagatacgacacgccacatggttgaattgtcttgggagtgtgtgcagaccacaatgcgagtctagctggcgctggtatcgctggcggagtgatgtcgttattaggactgcactcgagatcggtaaccgaattcgtagggagtcaaccgagcgctttctcgacaacgagaatccggaggcagttcgcaccgttgacaccgcgagccacttggtctagattggccccaacgccggcgttctcccccacggcgatgaggcgctcctggtatatgcctcaccattgcctcactgccgatccttgcaggcgcgaggaggcatatggacgattcttgcgcttcttcttgtggctgccggagttgtgacagacagttgtcacaacgcagtgtgaccgtagtgccgggagacccgctgttgttggtgacttggataacaaggccttgaacggtccgtggctcgcacggcgccggcacaatgcagactggccgggaggatccgtagcgtgaaatacaacttgcttcaagaaccatggattccggtgcttcgtatggatggctcccagactcatgtcggcatacgtgatgccctggcaagatcggggctgctcttgagtctcggcgagcccagtgcgacggacaatctggctctgcttcgattgctgattgccgtcactctgtggtgcaggtctgaacctggctcctcggagattgaagctctgcgggagtcgcgcggaatccctgaaggctggcttgcacgtctggatgaagactcgggcgcatttgaactctttggagatggcccacggttctatcaagacgggagggtgaagtccgaggtgccgggcagaccggcgtccgaccttctctcatacttcccggcggcaactgaaatcaaccacttcagacacatccacgacgacgatgtcgccatctgcccagcgtgttgtgccttggggctcatacgcctcccggtgcttgccattcagggcggcgctgggaagtcgccgtccatcaataatgcgcctcctgtctacttcatacggcgcggtagaacgctgttagacacactcatgttgaatatgcctcgtggcgggccggctgcggatgacagtcccgtgtggaagcccggcccaaggtcgagcagcgagatcggtacactcgaaggattcacgtggcaaccacgagctgtgtggttgggtccgacgagggcgacctcagatagtcggtgcagcaactgtggaagaagcggccccgtcgtatcaagcctggtattcgccaagggtcaggcaagaaaggatgacacacgctcatggagagacccgcacgttcactacacgaaggagcgcacgggcaacgataacgcagatccagacgcccgcgataacgttctgcgcgcatcgcatccgctcaagtacgcggccttggaggcgtccctctggaggaggacagcctcagcgattatgttgtccgtcgaaccacatgagtgcggcacgttgccagccggcgatagctacgacggaacaggaagcgacgcagtcgttgtcgagtgtattgcgccattcacatcccagggaaaggtcttcgatgagcaccggattgagtggcggataccacgcaaggttctccacgacgatgtcctgcgtcgctctgccttcgaggaactcgattggcttggccggttcaacttgaggaagctcctgggaagggcaagaggtgacggccgcatcaggaagcttgcggctaggtgcctagtcaatcccctcatctgcgagacagagcgccgactgttcggttcattcgtgactctgttgtggtcactggcgcaggagacttcgtcagagcagcgaggctcggtggaacgctggcgacgagaagtacttgacgtgctcgcctcgatgattcagcttgcccttacaacctgtgaccccggatcggctctgaaacgcaggcagatgcaacttcgggcggtggaagcgctccggcatgacgccgggatgactgtcacatcgcgtgggcgcgcttccgtcagacacgagcaagggcaattggagggagcgacaagatgaatccaaccgaggtctacgtgcggcgtcttctggctctaggggacggcgaacgagcagaactccgtcacaaacagggtgcctctctcagtgagtccctggagggatttgatttgttcaccggcctctggtggccattgcgacagcgcagtccggcagcaccgcagagagaaacaagttggctggcggcaaagctgatctgtcagtggccgattccgctcgcttcgtccgatgacagcgtgctacctcggttgctcggcagcgccgagcggcgactgtccgctcgctacgcacttcgtttcctgctgcggttcgataggctcttgcaatccccaatggctttgctggaaccgcagcttcaatgggcattgaaggtggtggcacaggcggtagttgccggttcagccaaagggttgaactgggtgcagcttcttgatgacctcgcggtatgggacggaagacccggcagggaatcaaagcacaatgtgcgcgacgcatgggctcgcgcctatctggcgtctagaaacagggagggaaagcgatgttagtcgagattcacatgattcagaaccacagtccgtcgaacctgaaccgagatgaccttggtgcccccaagagctgcacatttggtggcgtaactcgcgcgagaatttcaagccagtgtctgaagcgcagtatccgcaacccaggaaattctaacgacgtacacaacaaaggggcaagccttttcgtcgaagcgatgcgcgaacacacgggaatcaggacgaagtactttcctgaaatggtgcggcaggcgctgaacgactcaagcgtaccagacgaggaatgggacagagtcgtgcaggcttgcacgagtatcgccaagaaggaggtccagataggcgacgaggatgtacaggagcccggcgacagcgatgagcggcacaaactgccgcagctagtcctgttggagcgtactgaggcaaatgcgtttgttcatgtgttggaggcgatgcgtaccagtgacgagtggagcgccagctaccgccagtggatcgcaggcaaactgcagaagcggcctctcgcagctttcctgcgtgaactctcgcgcgcctattcgagacgatcagtggacatcgccatgttcggacgcatgactacttccgatgcgttcgaggacgtcgaagccgcaatgcaggtagctcacgccatatcaacccatcaggcggtttcggatgtggactacttcacggctgtggacgacctgggcgagttgggcggtggtgcaggccacgttgacgaggccatgttcaattccgcctgcttctacaagtacttcgctctagactgggaccaactcatcagtaacctcggtggctcttcctcttccgcactcgcagcgtccgcactgggccatttcattcgtgcggctgccatgacgacaccaaccggcaagcagaactcattcgcagcccacaaccttccagacgggattctcgtagaagtcaagcggaccggcaaaatccctgtcaactacgccaacgcgtttgtcgagcctgtcgcaatgaatgctccgcggggagtcgtgggtatgagcatcgctcaactgggccaatacgttcatcagattgcagagggttacggcattgactctcgtcgcttctggttctcaccgggggggcgctatcaattgacatggattgagcgctgtcagaaaggagagccgaccgagcgggaagttgttgcaggtgaagattcgcacgcgagattcgacgacttcgtgagtgtggttgtgcaagaggtttctggcctcgaatggaacagggtgaaggatccggacggtttcttgccggaggcgacatagtgactgcctcagacgaaagcatcgtactgctgaggctcgagggccctcttcaatcgtggggtgatggctcacgctttctgttgcggcgcaccatggatgccccaactaagtccggtgtcctcgggctcatctgctgcgcgctcggactgggaaggcgtgaggcatcccggcgcctgcatgaactggcactgctacgtatggctgtacggatcgaccgtcctgggtctcgccaatgggactatcacacagccggagctggatacggcatgctcacagcggagcgaaaggtcaagaagacgcagacgaccggggaatatgagaccttggtgtctcgccgtgagtatctctcggatgccagctttctagtcggcctgcagggtgagagtgcgcttattgaggaggtagcacaggcgctcgggtgtcccaggtggcccacttaccttgggcgcaagccatgcgcaccggcagtgccggtcgtcgcaacgagagtcacagtagtatcgcctggcgccgcggacaacgcccagagtctcctggaggcccttgagacacacccctggcgaccaagacttggcggggtagacttccctccaaacgataacgcgctaccgtgtctattggagtggcgaggcaccatccaaggacagcgacaccaggagcctcttgaagtctggtacgactcgccgctttccttctttccccccgcatatgcaccacggcttgtgatgagaaccaagctgcacgtgtcagtcgaagaacctctgcagcagtatctgtccgctcttccacggccgcgagcagactacaagaacagcgcctatcgcagggcgcgctccctcagattagccagtgactctggcctctgcatcttctgcaaggctcctgctaccaccgtgcagcacattacctatcggcgcgcaggcggcaacgagaccgtggatgatctccgttcgctctgtcgcctgtgccacgacgcagtaacgatgatcgagtacggactgggcatgggactggatcgcatcaatcctgaggacccgcagtggcgcgaggccatcattcagaagcggcaagaactcatccggttccggtcgctggagaccaggcggcgtcatctatctccagaggaggtggagtgaccatgtatctgtcggctcttctcgtcgacacaggcataaaccctgacagaccgcgcccgggccgactctggatgagacaaccctatcgtatccatcagaggttgtgcatgggattcccgctggcggaagcaaaggcaggcgatccggactttgtcagaccctatcgagtgggcgcctttagcggggtgcatcagaagatccggacaagcgagcaagcctttctattccgggtggaccctctggtgaacggcagggccatgattgttgtccagtcggcacgacggccggattgggagtacgccttccgtaatgcggactacctgctggctgggccacccgaagtgaaggaggtccaccatgactatcaagaaggccagtcgctgctcttccgcctgcgtgccaaccccactagacggaacaacgagacccgaaagcgggagggcgtcctaacggaggaaaagcagcgcgaatggctggttcggaaaggacagtctggtggatttgaagtactgtccacgacagtgaccgacgagagcttcaagagggcgacccggaaacacctcgaagagaacgaggactccgaatgcatgtcgcatctttcggtccgctacgacggcatcctgcgagtgacaggccctgaagccttacgcgaggctatcatcggcggcatcggcagcgccaaggcttttggattcggactgttgtccgtagcacctgacagaggatagcggatgcgcacgctcttcgaccttccacggttccaggatcgctggagctacgtgtacctcgagacggggcgactcgatgtagatgatctcggcctgtgcttccgccaggacacccgaacaacgcgagtgcccatcgaccagctctcggtgttgatgctcggacccggcactacggtgacacacgctgcggtagcggcgctctcgcggaacaactgtctcctggcgtggacagggcaggatggcacgcgactgtatgccgccagtacaggtggaacacacagcgccaaaaggctcatcaggcaggcgtcgctggtgagcgacgatgaatcccgcctgcatattgcctggcgcatgtaccgtttcagattcgcggaatccgtaccagacgtcgtgagtctggagagcataagagggatggagggcctacgtgtgcgcaaagcatacgccgacgccgcccgcgcatatggcatcgactggaagggcaggcgatacaaccagggcaactgggaagctgcggacccggtcaatcgtgcgctatctgctgcaaacgcctgcttgtacggtgtgtgtcacgccgcgatcctctcggccggatactctccgggactcggtttcatccacacgggcaagatgctcagcttcgtctacgacatagcagacctgtacaagacaactctcacgattccgctggcctttcaaaccgcggccgagatgcccgagagtatcgaacgcggcacgcgaatgcgttgccgtacggcgttccacgaattcagactcatggagagacttctgccagatatcgcggaggtgcttggtgttggtaatgatgctggggagagtgccgacgaacttgaggggcgcattgtcgcgatggctcctggagccggcgactggaacctttcttgggaacccgagtgggcgagtgagggacgagttgtggatgaaggccgtcaagacaacgaaggagaccgggtgggtgctgcagatatggtcagacaggaatccacaggggttctcctatcgtcagcacggcatccaaacgaggcaactggtggacttcgagggtctggcgctggtgacagtctctcctcaaccgcggactgttcaggatagcgacactgaaacccgttgatgacgagtggccaccatgcattccagtcgtggcaagtcagggtgttccccacgcaggtgggggtgaaccgtgggtaagctagggactgtactaggcggcttcgtgttccccacgcaggtgggggtgaaccgagaccgaggcgcagtcgtacaacgtcgaggacgtgttccccacgcaggtgggggtgaaccgcaggacgagtatcgctcccgaggcaggctcccgtgttccccacgcaggtgggggtgaaccgggcatcttcactggcgtagcggctgacgactacgtgttccccacgcaggtgggggtgaaccgtacgagtacacctgtgacaactgcggtgtgaaagtgttccccacgcaggtgggggtgaaccggttgagaagctcgaccagatgaaccgcgaactcgtgttccccacgcaggtgggggtgaaccggacctgtgcaagaagacaaaggtcggcacggagtgttccccacgcaggtgggggtgaaccgctggtaggcaagggtacgctcaccaacttcacgtgttccccacgcaggtgggggtgaaccgatgatggcctctcgccggaagccgattcacctgtgttccccacgcaggtgggggtgaaccgatggcccgagagtcggcgtcagcggcgaatgcgtgttccccacgca

SEQ ID NO: 501 - DNA, 1889433 bp, Artificial Sequence
  Synthetic Oligonucleotide
cggttcacccccacacgcgtggggacaatactgaaaaaaggctttgtttacggtatccggacgagaaaaagcccttcaaagtcttcgacagaacgagtcatatcgccccaactccgaaatttaaaaccctgttcgttgttacttgaataaatcatcgcgcaactgcctgatttcgcttgagaacatgatttttcccatagtttatcgcgcaccatggccgagattttcccaacgaagactccagcttttggttccattagccaacgcgttaattcgccccgcaaaccggatgatacgcgttcaagaatcagaaccaccattggtagcctccgtttcttcaactaccaacgaatagtcgcggccaccctcctctctttctgtaatattgtcccacaaagcacccggagctgcggaatcttggtcgaatgaggcgtcattagtcagagttttttctggcaacatcaacaccttcttgacgtccggaattattctctccaacaaccgggtcgaaacaaacaggtcgcggcaaaaaatccgtactcgtctttccaagctacctttctcttctgctgccgcacgaaatgccgctggaatcgtgatttccgctttgtaaagatccgcgacatcataaataaacgacaacatttttcccgtgtggatgaaaccaatagccgacgaaaatcccgctgagacgatagccgcatggcagatgccgtaaagacacgaattggccgcagataaagccctgttcaccggatcagcaacagtccatttgtcgcgccggtaactgcggcctgaccacggcactccggtctccgcggcagctttagcgtatgcttctctgacacgaacgccttccattccgcgaatctgacgaagggttaggtctggatctagtttctcagcaaatctcaactggtataaccgatatacaaccatcaaacggaggtttatatctgcccagactcgcgcctgatgtagaaagttcgcggcactccgagtctcgcccatgcctactgcgtagaaccggacaccttcttcgccgcaccaggcaacgaggcagccatgatccgccagaaccgaaatcgcggcatgcgtaattgagacaccgggtccaagcatgagaagagccaaattggcgcaggggacaggtaccttacctgattcatcgtggatggcaacggcccaggcttcctgatcgatgcgacaatgctcgacataaagataactccatccgtcgctgaactttggcagaacgtgcaggtcctttactcgcacgtcctccccccttcacccgatgcattggcaggagcaaccgaaagcaagccaaatccaaaagctttgccggatccgatgccgcgaattagcgtttccttgaagagctccggattgtccactgtgagaatcccctcgtaacgcgccgagtggaggcgcttcccttggcctttgccttccttattgatatagacgtaacccggctgaacgatggtgaaattcggatcgatggcaaaccctgcagaatcgattgtccgcccgtttcgcatcagccgccaattcgccaaccattcgtggagtttctcatgaacaaacgttcgggggtcttccccctggtgttttccgcgccagtcatcgatttcctggctactcgggactggcacacgtttcccgtgccgcgttttctctttgttctgttcctcttgcgacatcgtgttccagcgccgtttcggcaacgtcgcctttttttgagtcggattcgccaggaggcggaatcgaagacgctggcctttcgagaagacggggtcaaacgatttcacctcaggcggcgcagccagaagataatccgcattgtgaaaggcatagtcccagtcgggctctatggcagactgcacgatgatcatcactcggccgttacagagaggatcgatgcgaaaaagaaagccggcttcgtcgttgcgcggggagtggacttgtttcagggcatcgtactcaacttcgttcttcttccggtcagccaagtgtcgttgctcgggaaaatcgtcctgatcgtaaggtataaggaattcaggatcgcgctttttccgtggatcggatggaaaggccatgcaaaggcgctgatggacatgataacggttcctgagccacaaccgtccaggccgatgccgatcgggatcgtcccctacgttgatcaagagacaggagaggtacatagctattccacctcttcggagacgaggcgtcggcgtcgggtttccagcgagcggtatttgagaatctcggctcgcttttgaatgattcggtcgcgccagcgtggttcctcaggattgatgcggtcaagttccatgccgaggccatattcaagcatggtgacggcatcatggcacagaccgcaaagcgaacgcaggtcctccagggtctcgttgccaccggctcttcggtaggtgacgtgctggacggtcatgcgcgggccgggcgacttgcagaagacgcacaacccggtgtcggctttaattcgttcttcgcgacgcttccgatattctgtattcttgtagtccgcgcgcggacgcggcggtgctggcgtggaagtctggatcggatcccccacttcaactgggactgtgccacgcaggacaaatcgcgcctcgtggaccggtggatcgaagcaaaccggcacgtcataccacacttccgcgtcgtcgggggcgacatcacaatccggggcggaccgccactccacaagcgtttccaccgccctgttcttcggcgcaacgtcagtcttgtaccgcgggtgccacggcatggcgcccagcgcggcgttcaggccgtcataaccggcgggattcgtccacaactcaccctcactgggccttgcaagcaccgggacggacggcgggcaggacttgcggccaaggaaaaccggccactttggcgacgcaatcgccgcggcaatatcatggatcaacttcgcatcaccctggagcgccacgagaaagctcgcgtcggccaggtactcccggcgcgtgataagggtttcaatctcgccggtggaaggcgtccgcttaattcccttcccgtcagctgttataatgccgattcccgctcctaccgtgtggtaatcccaccaccgcgtgccgggtcggtcgatgcgcacacccatcgcaagcctgttcagctccgacaggcgttcccgcgccgcctggcgcggcaggcccatggcgcagcagagcaggcctagcacgccggactttgtcggcgcatccattgtccgccggataacgaactttgacgtgtcgccccaggcctggagtgggccttcaaggcggaggaagagtgtgttggcctcggtcatttcgccgcctctgcaggcgtcccggttgtctccatcttgtccatgaccttatcgacgaactgatcgaactcaccgaactcgtcggaaccgaccacggattgttcttgctcgtgttccttcttgctcttgtcgatccaggtaagacgatggcgcagattcggcgagaaccagaaacgctcagcctcgatgctgtaacctacaacgagatcgtgggtatacttgccgagccgggcgatactttcgccgaccaatcctcgttcggacttttccggcaccggatcggcgaaggcgttggcgtagctgacgggcgtggccgacttggttttgacttcgaccagaactccgtctggcggattgaatgccgcgaaggcgtgctgtttgccggaggggttggccttggcggctgcttcaaggaagcacttcacggtggtccttgcaagtgcggtatcgttgttcagattcgcgtgcaactggctccagtcaatcacgaaatgtttgtaaaaacacgccgaattgaacatggcctcgttgacgtgggccgcgccggcgtcctggcctggcacatcgtcggcagcggtgaagtagtctacctcgttcacgattgcgtgagtcgagatggcgtgagcggcggagagcgcagcctcaacggtaaactggcctttgaggtcctgaaacggcccctttgcatcgaactccgtcatgcggccacaaagtgcgatgtcgggggtcttgacgaactcgccgatgatctcggcgaatttcctgcccaggtcgctgttttcgtcgcgcacagcctcgcccattttgttgatggcggattgaggcagaaagaagagtatttcaaaagtgttctcatccctcaggccgacccctccgtctgtaaagaccttccgaatggcttttaaatgttgctcattcggttgattaccctcgcccgccgccgcctttgcgatcaactcaatcagccgccgtgtacgaacgccgccatccttttctaaagcggctgcgaattccggactacgccggatgcttcgcttgagacactggctggagatgcgtgcccgggtaacaccgccgaagatgcaggtctttggcgcacccaagtcgtcccggttcaaattcgccggactgtggttctggatcatgtggatttcaatgatcattttaatatcctcctttcttttttgacagcgttgagatatgtttcggcccaaatgtcgcgaacatcgcgtccacggcagtgcacctcgccccgttcccagatggagagatcgtcgaggagttgttcccagtcgatgcccttcacatcccgcacgtgcggcacgtgtccggcgacgacctgggcgacctctcccagcgcccaacgtaggtttggctcaagggctgacaggggcgagcagagcaaggcatcaaaacgctttcggaaacgattgcgggacttgaactccggtgggtcgcagggttcgcagcggcccaaaattttgggcaaagacggccccgcacctgaatcgggcctgatgtgcgggacgcggaacgcgccgaaaagcttggcaacgagccatgacggctcccggcgcggagtcgccgggcttttcgcccgcagcggccaccagaggcccgtgaagaggtcgaaaccctggagcgttgcgtcgagcggccgtccggccagacggcgcagccgcgaacgctcaccttcctgcaagtctgaaagcctcttgatgtattcagcggtctggctcattttgtgcctctcttcttgcggccacgtttcggtttgctaggcatggccgcctccgatagcgcgtcaccatgttctgtcttattgagtgtcgactccagggccgatcttgcccgcgccaaggcctcccgccgttgcagcagcgagccagtaatagtggaacggacgacttgctcaatgacccggatgagaatctctttaaccgattgtcgccactccttaacgtcgtattgtaacaatagttccctgaagcaattctccatatcgacatgcgtttggctactgagcgcacacagactcgaacgtatctcgtgccccagggatttttgcccatgcaaactctcaacaatcgcatgccctttcggaggttccccccatactttctccttcgtcttccctttacctgtacgcgcgcttactgtggcccatgtcgctcggcgcgcccagtcgagttccgcacggacggcattcttgcgttcctggtcaagggcggccatgaaaagggaatgtgatgcgatgtgtttgtaaagcgcttgtacggctgcgacaaggactgtttcatacttcgttccattctgatccgttgtccggttcagaatcccctgcatgactgaactccacgtttccgcatggtgttccaacgcatcgttggggctcggccaagagggaacaatctgtttatcatgcacatccagtctgagtagatgtggatcgtcgcgccatggctcgctggaattgcgcttccagcctggtcggaagcgtatggtatatacgattcgatctgactgcttttcacaataagagcagcggccttcacgaagattgcgctctccgttttcagagggtggcgccagccggacacacctagagcgccatgtgaatgccttcaaagggccgattggagttttttcgtcagcgccatcccagacggggcggtctttttcgacaggcatcaacctttgcaattcgcgtctgagagtaatgaaaaggttcggtccagcatgaaacgtatacgaaggcgtgtttccattcaagctcgcagtcatgctctgtctggcaccagcggtccccgcgctcgcaaggaccgaccagcgcacgagtgccagagcgcaacatcctaaacacagcccgtcgctgtcgtcgcgtatgtgacgaaagtgagcgatcttagacccggaagggaactcgtgcattaagttggaggcaccgacatccggcgttgccgcattgagatcctgatagaacctcttaccatcccccaatagattgaacgcggccttgtgttccttcagtctacccagccagttctccggtatgccggagttcttctcgtccaacgccgcaagggaagacttcgcgtcctctttgcaccacatgagcacggccaacagaaagcgcaagagggccaccctgtccatgggattactggcggctatctgccggatttcgcatgcatcggtcagcacctggcagatcccgacgcgatccgtcttcccattactgtaaagaacaggtatccacttctcttcaagcaggttgtacgccccttgtgttactggaaggcccatatgattttcctccttggcatgttgctgtggatttcacgaacctgcaaaccgcgctctgcataaagggacagcacctggagggagtaatccaccgaacaggtaaccgcgatcaattgatagaatgtgccggtttcccaaagatgttgaagccactggatgctggcgtccacgatggaccggttgcactccggagcgagggccactccatggctgaaccattcctcatcccgcagttgaagaacctcatcaagcgtgtgccgtctggcatctcctcgataggtgaaggagatctcctcaggtgcgacgttcacaaccgagatttgcttgatgtatccctgcaccatggaagtcccgaataggtaggcatagacccgctcaccggcaatctcgcgtccgtctcctctgaagcgtgtggccgtgaggctgacgacctcagcattaaggaaccgctcaaagacccgctcccaactcctggccatgttgcggtgcccctcgtcgacaagtgtcaggtcgaagaaatcatccgggaaagcgggaagccgacggtctgcccgactggccagttgctggatgctggtgaccacgatgtgggagttttcgcagtcgtagatatttgcgtcccgaccgtccgggaccgccggaaaggggccatgattcacgtcggtcagaacgcgcgtagaggtccagaaacactcacgtccggcgacatcgaaggcggcgaagatgccccgccgaatctcaaggttcggcgcgagatcgccagcacccgcccccgggcgatctcgaaaggcatattccgggcgaaaacggccagcgatttcggaggaaagcaaccactgaatccggttgaatccggccacttttcggccggaatatgcaataaggccttcgatctttgtagacatgctttcccccgattgacatatcaagggaattgtaaaccagaaaaaaggaaaatgctaactaaaaaaaataaaaaactgctatgtgaaaaataaaaaaatagaagaaaggcggttttggctccccgggcaggactcgaacctgcaacctattggttacaagggccccggagtttcctccgggcttggactatctcttcacccgttctctctcgaaagagggacgagggtgtcgggcgcttccccgggcggataagcccaggtacgagctttcgctctagtctctgcaccttccccgccgcaccggcggggcttggctcaggattaccctctccgcgccgcggagggcgggcttccctgagttcacccgatttttcaaccacgatttctcgtggaagctgcaattgagcttacagccaaccgctctgccgattgagctaccggggagcaagccggaataatttaacatgaccactcggtaaaggcaagggggatcgggcggggccggcgcggggaggaccgccggagacacgatgtcggatcggccgatgacaaccgccggcgtaagcgggattggatccggggattcggcgcccccgccgcgtcttcaaagccgcgctgtttccatttatcggagatttctgctatttttcctttccggaaaagcccgggaggccggaaaagccttctccgcgggcccgcggcgccgtcgcaagcctttcccggctcggcacgcctcggccttgggggatcgccctccctccgcggcgccctgcccggcgcttcgcgcgtcgcatcgcccggcccgccgcgggcctctccggacatcggccaaaggagaagctcatgaaaaccatcggcctcatcgggggcatgacctggcattcgacggtcgattattaccgcttcctcaacgaggacgtccatcggcggctgaacggcgcccactccgcctcgatcgtcatgcgctcggtcgatttcgaggaaatcgaaaacctccagatcgccggcgattgggagcgcttgaccgccctcatgatcgaggccgcccggaccgtcgaggcggccggggcggaccttctcctaatctgcgccaacacgatgcaccggacggccgaggccgtggccgcggcgatcggaatccccctggttcacatcgccgacgcgaccgcggccgaaatccggcgccaagggttgaaatcggtcggcctgctcggaacccgctacaccatggaaatggatttttaccgcggccggctggagaaaatgcacggcttgcgcgtcctcgtcccgagcgaagccgaaaagacctccgtacatgacatcatctataacgagctcggcctgggaaagatccacgacgcatcaaggaagacctaccagcggatcatcgacggcctccgggatcgcggggccgagggcgtgattctcgggtgcaccgagatccccctcctgatcaagccggccgacgcgtccgttcccgtgttcgacacgacagccctccactgcaaggcggcggtcgacctggccctcgaataacggtgaacgatcctcgtccgctagccgacccgggtcttttcatcgaaaaaccggcctttcgagccggcctccttccccgtccatcctccgggccgacgattcctcccccggtcatgaaaagcacgccgcccccttccctttccgccagggggccggatgaggcttcctcgaacccggactcgggcttggatgcccggcggagaatttcgttttgacttcgcggccgcgcccgtgatattttgttccctctttcttgccgaggagggacatgtccactccggtcgagcgatgggttgaggaacaggaacggatctacaagcccaagcgggtctactggtgcgacgggtccgaggcggaggcccatcgtctgatcgagatcggcctccgcgaggaaaaaatcgggccgcagcccgttttcaccgccctcaaccaggcgaactggcccgacgcctatctccatcacagccacccgaccgacgtcgcccggaccgagcaactgaccttcgtctgccaccccgaaaaggaccagtccggtcccaacaacaactggatggcccccgacaaggccaaggcgatgctgaccaagctggccgacggggcgatgcgcggccggacgatgtacgtcctcccttacatgatgggccatcccgactcgccctacgccaaggcctgcctccaggtcaccgacatctcctacgtcgccgtctcgatgcggatcatgacccggatgggaacccatgtcctgaagagaatcgggacgtcggagcgattcgtcaagggcagccattcggtcggcgacttcagccccaaccgccgctacatcatgcatttcccccgggagagcctggtttggagcatcggctcggggtacggcggcaatgccctgctgggcaagaaatgcttcgccctccgggtggcctcctacctcggcctgcggcagggctggctggccgagcacatggtcgtcatggggatcgaggacatgaaaggccgggtgacgtatatcaccgcggccatgccctcggcctgcgggaagaccaacctggccatgctccagtcggccctccccgaataccgcgtcttcaccatcggcgacgacatcgcctggatgaacgtcgggcccgacggccgcctctacgccatcaatcccgaagcgggcttcttcggcgtcgccccgggcacgtcgatgaagaccaatccgaacatgatccggaccctcaagggccggaatttctacccgacgctctacaccaacgtcgggcgggacgtcgacgcgaacgagccctggtgggaaggcctcgacggccttccgccgcgcgtggaggactggcagggccgcccctggatccccggctcgaaggacaagatcgcccatcccaacagccggtttacggtctcgctctacaattgcccgacgttgtcgccggaattcgacaatccccggggcgttcccatttcggccatcctcatcggcggccgccgctcccacctcatgcccctggtggtcgaggccttcgactggacgcacggcgtcttcatgggagcccggaccggctcggaaaccacggccgccgcggccggggcggtcggcgtccttcgccgcgacccgttcgccatgctccccttctgcggctacaacatgggcgactatttccgccactggatgaacaccggggccttgatgcgcaatccgccgaagatcttcgccgtcaattggttccgggtggacgagaacggcaagttcgtctggcccggcttcggggacaacatgcgggtcctcaagtggatcatcgaccgggtggacggcaaggtcggggcgcgggaaacgcccatcggcctggtccccgacatgaatgatttcaacatggaaggcctgccgatcccccgctccaaaatggaccggctgttcgagatcaagccgtccgaatggaagggggaagcgggcgagatcaagaagtttttcaacggcttcggccggacgatccccttcgagcttcggacgaatctcgagaagatggagcgggccctgaagctctgattccggccgggggtcgatcgatccggcggcattcaatcaagcgggaagcttttttctttatccccgagagaggcggcgatccgctcaatcaccctgtcgatatcgtcgcgaggaatcgtcagcggcgggagaagcctgatgatgttgagacctgaagggaggacgaggagccccctttccagaaggtccagcacataaagcttcgctttttccttgagctcgatgccgatcatgaggccgagccctcttacttccctgattttggaggatttgatgaggcgcagtctttccatcaggtacgagccttttctttcggcttcaagccaaagcttattttcgagcatgaactcgatggcggccgttccggccgcgcagcaaagaggattgccgccgaacgtgctgccgtgcttcccgataccgacctcgatttgatccgaggccgcgacggctcccatcggaaggccgccggcgatcgatttcgccaggcagagaatgtcgggagcaacgccgaagtgttcaaagccgaagaactttcccgttcgacagaagcccgtctggacttcgtcgatgatcaaaagagcgcctcgctccgtgcacagccggcggagccgcgcgaaataatccggacgtcccggataaacccctccctccccctgcaccgtctcgacgatcaccccggcggtttccaggtcgacggcgcgttccattttttcgaaatcgttgtacgggacgaaggaaaagccgtcgagaagggggaggaaatcctcccggtacttgctgttatgggtcgccgacagcgcgcccagcgtccttccatgaaatccgtttacggtcgagacgaattttttccttttggtcgcgagcctcgagaacttgaccgccgcctcgaccgcctcggcgccggaattgcagaggaaggccttgcgaagccctgcgggcatgacggaaatcaatttttcaagaaaagccgcgcgggcgtcgttataaaatatattcgcgcaggagatgattttttccgcctggtctttcaccgccttgacaacggccgggttggaatggccgacgttgagcgagccgttccccgcgacgcaatcgatatactccctgccgttctcgtcaaaaaccgccgcgttttcccctttgaccagcactaaatcccgtttggggtaaacggggaaggaataaatcttttcggcttcccttaaaccggtcatgagatcacggtccctcgattgttgagagcgtcccaaaccgggttttcgccccttccgtcggaaatcacggcccgggccccctcccggccggcgattttcaaaagggcatgaagcttccttttgatcctcccggaggcgttttcgacaaaaaaagccagctcgcttttggatatcctttccatcgccgaatcggggtcggacggatcccggagataacccttttcctcgatgaacatgacgatttgatccgccttcagctcttccgccagaaacgccgtgatgtcgtcgttttcagaattcacggcatagccgttctcgtcgatgatcggcacggtgaggaccggcacatagccccggtcgaggagcatcttgagaagaccggcgttgatcccggacggttttccggaataatccctcaccatcaggattttggaatcttttctcatcctgatgccggcgttccttttcccggcgatcagccggccgtccaggcccgtaagcccgaccgcgttgatcccgtgccgctgaagagtctcaacccaccttttgttcgccagcccggcgtaggccatcatcatcaagtcgatcagcccggggtcggaaaagacgcttgaatagcccgagacggacgtgatcctcttgatgtcgtatcccgtcttcagcgccagctcgtcccgcaggccgttggccccgtggacgatgagaaacggttcgtgaaccaggctcagtcccttcgcgatcccctcccggttgatgtccttccctccgccgattttaaaaatgatcatttctaggcttcaaggtaagaatggttgggaaccctttcccaacacgattcctcgtcatccggatacttttctgaacataaaagaaacgtgccgttttcccttttgatcctcatcgagaaatactcttcgtcttcgctgaaacgggaataaacggcgattttgctcatgtcgcaggaaaccatgttcatcgcccggacataagcggttcgttcggcgatgatgtctccgccgcttttcaggggccgcggaagcccggtgtcgccgagccgtttgacaaaatgaaatatcttttccgccccgctgacgccccggccgccgattcggacgccccggagctctccattgaaagcgaacgccaggcggcccgaatcaaacggcatgttatactcaaggtttatgttttcattcctgaacgcgcttcgggcgtggaccatgagaagccggctccggccgaagccgcgcattttttgctcccagaccggcgcgaggctcttgtaaaccttccaccgtccgccgtccggaaccgctaagccccagccgtggccctggtattccttgcttctccggcaaagagccgcaaaccgttccaggtggcgggaaatctcgaattccttgtcggattttacaaccaggatcctgcacatggtcacgccgggtgaagtccgcagaattcgagtccccggttctcgggaaatccgcacatgatgttcatcgcctggacggcctgcccggccgctcctttcatgaggttgtcgatcgcgctgatcaccaccagccggtttgaatccgggtcttgttcaaatccgatgtcgcagaaattggtgccggcgagaattttcggctccggataccggtaaccgccgcttctctccttgacgatccggataaacggttcgccggcgtagtgctctctgaagatcttccagatttccttttccccgagcttttcctctaaaaagacgtggcacgtggcgagaattcccctgaccatgtcgatcgacgtcgccgaaaaatggacatcgttttctccaagccccagctcctgaatgatttcagccttgtgccgatgggacgtgggttgataagtacgcacgcagccgcttctttcgggatggtgcgagtattcgcttggggagcggccgccttcgcttgagccggccttcacctcgatcaccgtttttcccttttcgactgcgccctgtttgaagagaggatagagagcaaggatcgaaaccgtggcgttgcaaccggcgctggaaatatagctcgcttttttcatctcctcccggtgaagctcggggattccatacacgaactgattcacaagctcgggccgcggatggcccgagccgtaccatttcaccctgtcctcactcctcttcagcctgaaatcggcgcttaaatcgatgattttcggggcctgattcataaaatggtcgatgttcttgatcccttctccgtgcggcaggcacaagaaaatcagatcgcactcgttcagttcgctcgatgaggaaaaacagaggccggtgatcttccgaagattgggatgacgcctcgtcaccggcagacccgcgttcctttccgacgtcgcgcggacgacttcgacgttctcgtgaaaaagaagaagcctcaaaagctcgccgccggcgtatcccgaagcccccacgatcgcggcccttatggttcccatcgtcagttcccccgtccccgctcgatgacataatcggcgatcaacgccgggatgttcacccccgtaggttcaaggctgtttttgaattccatcgtatggttcacttcgttgatcaagtagcccgagtcgctttcgaatacatcgatcgcgacaatgcccccgcccacggccgcggcggcccggacggaaaggtccgcgagctccggcgtcacggggcaattcgtcgccgctccgccccttgccgtgttggtgatccaatgcggagaactccggtggatggcggcgacgcatgttccgccgaccacgaagctccggatgtctcttccgtttttttcgacatatttctggatgtagaagatcgaatgatggtaagagccgaggaccgctttgtgctcgagcagggcttcggccgcgtcccggtcgttcactttcgacagaagccttccccaggaaccgaccgccggcttcaggacgaccggataccccatgtcctcgatggctttgagggccgattcacgggtgaacgcgatcttgacctccggctgggtgattccggcttccgccagggcgatcgatgtcattagtttgtcgccgcacgtcgccgcgaccgcgtaagcattcacgcatttgattcccgccgcctcgaaaagccggattgcgtaaagcgccttcgaatggctgaggcatcgttcaacgacgacgtcgaagcgatggttttttcccccgagggtataaacgaggtcccggtcgtcgagaaggacgacgtcgaggccgcgccgtttcgagaattcatccaataagagcttttcatcctttctgataagcgaatgaagaaacccgattctcattttcgattcctccggataattctttctgatatttcacgatcattttcagttcttcaagatccacggttcttccttttttccccacctccttcactttctgaaggacggcgttcagccattccctgtcgtcggcgggctcgccgattttttcgaggttgtactggagagaggaaatccccgacatgtgatcgagggcgatcgttgaagcgcggccgaagcggccgggatcgaggctttcataatgaagcggattcttaatggccgcctgggtgtgcactccggcgcaatgggtgaaggcgttctttccggtggcgggaaggttgaccggcacgggaacattcgaatatcttgaaaccgtcgcgtaaatctccggcaggatctttgtgttccattttccctcaaggccgaaatcaaacgacagaaccgcaagaagcgtcccgaggtccgtgatgccggcccgctcgccgaggccgagaaccgccgcgtccacgatatgggcccccgccctgatcgcgtcgagggaattcgccgcggccaggccgcggtcgttatggcagtgcacctccaggaacggagccaagccgtccttcccgagatcgtctttcaacctcgaaatgaactcgtacatgctccgttcggtgccgggaatcatgtagcccgtcgtatccgccacgctgataatatcggcccccgccgagacggccgccttggccgcggaaaaaacgttttcatatttcgacctgaccgtgtcttcgggggtatacctgatgatgagggacggccttttttccttggcatatcggatgacgcttgtgattttatccacggccgaaacaagattcgtggaataatcctgaagccgccggtcggatacacagtaaaatattccgatgaaatccgcgcggcattcgagcgctttatcgatgtccgatctcatcgaacgcgaatgcgcggcgattttcgacttcatccccccggccgaaatgagggtgacggctttcgcgatatcctcggtgacggcggggtgaccggcttcaatgaaatcgacgcccagctcgtcaaggatcccggcgatcgccagcttgacatgaatatcgaagtacaccccgggcgtctgttcgccttctcgaagagtcgagtcgagaattttcaccatgtcactggccccagtcttcttcctcggcggccgcttcggccaccacgacaggatcaaggctcaccacttccatttgagagccgcactcccggcaagggaaaagttctccctcgatggtcccgctcaaaaggatcatcaacgccccgcaaaccgggcattccgttttcaattccgacatcgttctcctccaattcaatttgagacggcattatggagaacgaggcgccccattgtcaaaaatacataaattatttactaattttattattcttgttatatttttgacatgttaaccatatcggaagaaatccatagaatcgtcatgagtactccttttttggaggaaggtcttcggagcgggatcatcaacctgtcctctttggccaggaatatccttcccgaaatcaaaaaaagcctcgagaagaatgtcaccgaaagcgctatgatcatggccctcaagcggtattcagacggaatccggggccgggctcaaaagggatccttcgaggttgagatcctcgatctcaccgtgcgctcgaacctcgcggaatacaccttcgccgcgtcggagaacatcatcaaaaagcaggaaaagctcattcacgacgtgtctcatcaaagggataaattcctgaccttcaccaggggcatatatgaagtcacgctgatcatcagcgaagagttcaggaaaaacgtcgacgaaatcttcaaaggcgaacggaagatttcctctttttcgaacctttcggcggtcattctcaggcttcacccgaaaaccgtctcgacccccggcgtgcattattccattctcaaacagctcgcctggtcgaatatcaacgtcatcgaggtcgtttccacatacacggaattcacggtcatcatcgacaatgcccggatcgacacggctttttccgttctgaagaacctgatgatgagataaaaaggaaatccgggacgtatccggaccctcgcgggccggatcgccgcccggctctccacacccgccgccggccggaaggacgacgcgcgcgaggtccgccggaaaggtcttgacggcgaacgccgcggagcggacccgaatttccaggacgatctccggcctcccgggcagggaaaaaaccgcgggagcggttcagaagcggtacccggcctgcttggcgactttccggtaatcctgcccggagatctcgaccaccttgcacatctcgtagatccgcgagcggaggcggacgccgatccggtcgacgagcgtgtcctcgggcttgcgggtcgcgccgaagccggccgttttcttgaacatcggggcccggtcgtcggccgtctcggatgtgtcggggtagttcgaggtgaagatcgtcaggcgccgctcgttgtaacggcggttgatgatgtagaagatcgtttcctcgacccaggtcgacgaccgctgggcccccagctcgtccaggaccaggacgtcgctttcgaagatcggccggaggacgtcggactcgctgacgtcggaatcgggggcgaacgtggcctggatgtcgcggatcaggtcccggaaatcgtagaagacgccggccgcccttttcttcgtcaccagctcggccaagatggccgtggccaagtgggttttccccacgccgcaggggccgatgaacagcagcccgatgtcttgggccgggaaattggagatgaatttcctcgagatccggagggcgtccttgtgggagtcgtcatggacctcgaaattcgccagggtgcagtcgcggtagcgggtggggatgcgggtccggaggaggacggcgctttcggttttcgcctcgtggcaggaacagcggcgggccgcggggcccgctttcgtttcgacctggatccagcccgtgtcaaagcagcgcgggcattcctcgcgtcccttgttcttcacctcattcgtccccgttcagttcaagtatccgcgaagctcctggagcttgtgggaccggctcagcttggtcatggccgtctgttcgatctggcggatccgctcgcgggtcaggtggaggcggtcgccgatctcctggagcgtcagcggccggtcgtcgtccaagccgaagcgtaattttaacacagtcgcttccttctcatccagctcgcttaggatctcccggacctggttcaagatggaagccttgatgatctggtattcgaccgagggggagatcggatcgccgatcttctcctccagcccctggccgtcctcgtcgaaccggtcgttgagcgagatttccttgttttccaacagggccaggtcctcgatctcggagaccgtcatcttcatcgccgccgcgatctcctcccggttcggctcccgccccagctcggccgacaactgggcgactttccgcttcatcaggagcatctggtcggagattttctgggggacatgggtgacgcgggccgaggcggtgagcgaatgaatcaccgcctggcggatccaccagacggcgtaggagatgaacttgacgttgcggccgggatcgaacctcttggccgcctcgatcaagccgagattgccctcgttgatgaggtcgagcatgtccaagcccattcccttgtattttttgacgtaggagacgacaaaccgcaggttgccctcgatcatccgctcgagggccttggcatccccggcatggatgcgctcggccagctctctttcctgctcctcggtcaagcgcggaaaacggccgatctgctccaagtagcggcggaggttccgcgattccgtgaaatccttgtaggacgtcattcggatttgtcgactttcacgatctgggacgacgagacgtggacgaggctttggcggcgggcctcgaactcctcctcccggccggagaagaactcccgctggaaggaatccatgaaggcttggacctcggcttcgatccgctcgattttcgcccgcatgttcaagatgacttccacccccgcgaggttgacgcccaggtcgcggacaagattgaggatgatctccaggcgtttcaaatcctcgtcggaatagagccgggtgttgccgcacgagcgggacggtttgagcagcccctctcgctcgtagaggcggagcgtctgcggatggatatggaaccggtcggccacgctgctgatatggtagtagctcgatcccgggcacccagcctcgccggccttgggccgcggccgccgcggcccggcggtttcggctttccggtccgccggccggggcttcgttttattcattgtgtttcttttcatcgtggaacctcttcattcattccggcccgcggactgcccccgtagaggggttcgagcttcttcatcaggtcccggacgcgctcgtcgccgaagggcggcgggacgatcatgacctcgacgaattcatcgccgcggatccgggccccgggctgcggcgcccccttgcccttcaatcggaagcgctgtccggatttcgtccccggcgggatgcggatgacggccggtccgtccagcgtcgggacgtcgattttcgctcccagggtcgcctcgggaaccgtgatcggaaccttgacgtggaggctcatgccctcccgccggaagagcggatggggcagggtctcgatctggatgtaaagatcccccgggggaccgccgcccaggccggcatggccctttcgggggatgcggaccttgcttcccgtgtccactccggccgggatgcggacgttgatcgtttcgggcatctcccgcgtcccctgcccccggcagtcgccgcaatcgcgcccggccacggtcccgcggcctccgcaggccgggcagacgccggaaaacttcatgtagccgcgctgctgaaaggccttgccggatccccggcacgtcgggcaggtcttggcctcgccgcttttggagcccgatccgccgcaggccggacaggccgcccgccggttcaggcggatcttggtctggacgccgcgaacggcgtcctcgaacccgactttcatcgtgtagagaaggtcttcacccctctccgggccggccgcggccgccgcccgggcggccgccccgccgaagatgttctgaaagaggtcgcggaacgatcccccgccgaaatccgaaaagtcgaatccctcgaagccgcccgaggcgtagtcgccgccgccgggcccgccgtcggccggcgggcgctcgccggcgaacccgaactgatcgtaccgggctttcttcttgggatcgctgagaacctcgtaggcggccgatatctccttgaatttggcctcggccgccttgtcattgggattgagatcgggatggtgcttgcgggccaggcggcggtaggctttcttgatttccgcgtccgaagccgaccgtccgactccgaggatctcataataatccctggccatgcgctcccctctttcctttcccccgtcttaacccggggaaaaatcgccggaggagcggagggccgctcctccggacattcaatcccatcccggccgggccgggcgtcagtttgattttccgtcgtcaacgacttcggcgtcgatgacgtccccctcggacccgccgtttccgccggacgggccggacgaagcctgctcgggaccgtcggaggcggcccccgctccgggctgcgggccggcgctccggtagagaacctcggtcatcttgtgggaggcccggttgaggctttccagggctttcttgatggcctcggggctgtcggattcgacggccttcttggtcgcctcgatctcggaccggacggcctcggcttcggccgccgggatcttgtcggcgttttcccgaaggattttttccaggctgtagatcatctggtcggcctggttgcgggcgtcgatcgtctcccggcgctttttatcctcggtcgaatgagcctcggcgtcggagaccatccgcttgatttccttctcgtcgagcccggaatgcccggtgatggtgatctgctgctgcttgcccgtccccatgtccttggccgagacatggagaatgccgttggcgtcgatgtcgaaggtgacttcgatttttggaatgccgcggggcgccggcgggatgccgtccaagtggaaacggcccagggtgcggttgtccgaggccatctcccgctcgccctggaggatgtggatctcgacgctcggctggctgtcggaggccgtggaaaaaacctcggttttcttcgtcgggatcgtcgtgttccggctgatcatccgggtgaaaacgcctccgagcgtttcgatgcccagggtcagcggagtcacgtcgagaagaaggacgtccttgacatcgcccgaaaggacggcgccctggatggccgcgccgacggagacgacttcgtcggggttgacgcccttgtggggctcgcggccgaagacctgctggaccagcgcctggatgcggggcatccgggtctggccgccgacgaggatgacctcgtggatgtcctcgggcttcaggccggcgtccgacagggcctgcttgcagggggccacggaccgttggatcaaatcctcaatgagggcctcgagtttcgcccgggtcattttcatcaaaaggtgcttggggcccgaggcgtcggccgtgacgaacggcaggttgatctcggtctccatcgtcgtcgaaagctcgatcttcgccttttccgcggcttccttgagacgctggatggccatcttgtccttggccaggtcgatgccggtttccttcttgaattccgtcgtgatccaatcctggatccgttgatcgatgtcgtcgccgccgaggtgggtgtcgccgttggtcgatttgacctcgacgacgccttcccccacttcaaggatggaaatatcgaacgttccgccgccgaagtcgtagacggcgatcgtctggtccttcttcttttccatgccataggccagggccgcggccgtgggctcgttgatgatccggaccacatccaggccggcgatttggccggcgtccttggtcgccttccgctggctgtcgttgaaatacgctggaacggtgatgaccgccttctcgactttttccccgagataatcctcggccgcctttttcagcttctgaagaaccatcgccgagatctcgggcggcgagtactgcttgtcgaagacagcgatccggacgtcgccgttgggcgcttccgtgatcttgaacggcacctgcttgatttcgttcgggacctcggcgtaccggcggcccatgaaccgcttgatcgagtagaccgtgttttcgggattggtgacgcgctggcgcttggcgacctgcccgaccagtcgctcgcccttggccgtgaatccgacgacggacggagtcgtccggccgccttcctcgttggagatgaccgtcgcttggtcgccctccatgatggccacaaccgagttcgtcgttcctagatcgatgccgataatcttagccatatatgatactccttagcattaagtcgattgttaatataaaactttagcgtatcgttgtcaagtattttattgcgatatattttatttatattcaatataatacaattattttttacatttttatttttcgttcccaattaatccggattaaatcgctttccctttatacggagatcgcttccgtccccccgccggaaattattccggccagtaaaggatgcacttctggccttcgaaaaaagaccagtaaatgtttttggccgcgctttcctcgagaaagacgatctcgatttccgtgaacggccgtcgtccgattccccggacgatcgttttcaccgaccggccgatcccccgggaaaacaaacggcccgccccgtcgagaatccaggcgaacccgcttttccttagacggacgttcatccggatgtcgccgggaagctcaagcgtgaaattgaccggcatcttcaccaattccaggatgtcgagatcgtcgtttttggccgtcggcttcttgtccgtttcgtcctcgactttgcccggcgtgacgtccttcctcttgggcgcgttgtaggcggtttttttcaacagcgggcacgtcatgactccgccgtgccgcccccaggttttcaccttgaagatcggccattctttgagaacgaggcccctggccttcaaggagacctttccggcctcgaaatcgaaaataaaatacgtcgacggcgtccgggcgaggccgtattcctgctcgacgcgggccgctttccgcggggacggggcggccgcttcctgtccggccgcgccggcaaccagaagggcggttcccgcgacaagacctaaaatccgtcgggttttcatgtcagtagatgtagactttcgcgcccatgggcacgctttgatagactttttttagatcatcgtcccccacccggacgcagccgtgggtcacgttccggccgagcatccgggtgtacagcgttccatggataaaataaccgctgccgatgcccagggcgtaatcgcccagggtgtcgttgtcgatccggtcactgaaatttttcggcagatcctccccttcctcgtaaaaggcccaatccggcttgatccaagtcgggttgacgagcttggaggataccgtaaattccccgcggggcgtgtcgaaaacccactttcgctcgccgctgggatcctggaggatgtcgcccgatccgcaggacacgatcgccagcagaagctctttgccgtcccggatcacccggaggcggttttcggccgtgtcgatcatgatataagtcccccggggcagcaggcttttcatcctcgattcgagctgccgcgtcttagccgccagggtcttggcctcgacaggcggcgggatttcggcccgctcctcgctccgggcccaggaacgggcgattatgttcgctgcgaggacgatcagcccggccgcgaggatgaatcccgcggccgcgatcagaagaatttttctgattttagcggacatttttcttgaatttccggatttcatccaggatcgtgttttcgacgtcggtcgccccgacgatcgtcaccggcgtgccgacgaccgaccaggcgtagatgtcgtccatatccttgtcttccaacccaacacagcccttggtaaggctgtctttccccccgccgtggatctcgatggcccctccgatcccggcatggctcggaatctggccccggcgcttggcctcggcgaagaaccgcttgtcgtcctcgttgggataatcgattagaagggctttataaaacttggaggccgggattttcttaacgactttgtaccgcccctccggagtcgcctcgtccccggcccggcgtttgtccgaaaggccgtatttccccaaaccgatgtcgtaccgggcccggaccttgcccttttcatagacggtcagccggcgctcgaccttattgacgaggatcgccacgccgtcgccgttctgggattccttcacggcctcctccgcccagcgcctccacttggccagctggccggaatccaggtagcgctcaaggagccggacggccgcctcctcggctcgttccagaaaaacttcgccggccgcggccgcggccgaagccggttcatatttttccttggagaccagcatccgggcctcgaccagcttgatctccgcctgggaggcgtttttccggatgtcgtcgttttcgttgaaatactgggtgatgcgatgaaggctttcgattcgggcggccagggtttcagccgataaggcgaaggttttggcccgggcggccttgtcttcgtcgattcgacggagcagcgcctccccctcggcgacgagcttttgaagatcggcctggatccgggaatagtcccggaaccagccgaaccgggctttctcggcctcgatccgtccgtcggcgtccttcaagccggaccggaaggcctcataatcccggggaataaggagagaaccgccggccctccagaggtcttgctccaggaccgaagccctggccgcctctggaggtaccggcggcgtgctacaagaacagttgacgaacagactcaggaggcaggcaacgccggcaaacccaaggtttttcaagcgcgcccgcgattcctcaagtcccgtcgtcgattaccgcttcaccttcgcgatggccgcgttgatctgatcggcgatggcggcgactttcgccttgacggcgttggccttgtcctgggcgccgatgtagtcaccggcgtcgagggcgccctggatctccgtgtacatcgtttccgcgccctccaggtcggccttcagagcttcgaggtccttcgccgtgcccttgcccttgggagctttcttcagaagctcggtggtctcggtgatcgcggcctgggcttcgccctgcagctggatcgcgagattcttcgcggcttcgatcttcgccggcagagcggcctgcaggtcggcgaccttcgtctgaagggccgtcagcatttccttcgccggaccgaatttcttgaagaacttcttgtcctgagcggcgatttcgtcgagagccttggtcaggtcgtcattgacggccctgagctcctcgggggcgtacttgtcggcgccggccgtagtcacggtctcgatggccgctttcacgtcgttgatcagctgggtaggctgcttgcagccggtcagaacgacagcgatcgccaaaacgagaacgacagttttcgtgagatttttcattgcgtcctccttttctcactcgatcgcgtcactcttcatcggacacgcacatcgaaacctaatctcgaagggtatcctcgtatagacgtcgatctggactggtatttatcataaaaaaatatccttgtcaaatgcgccgaaatacaaaaaagggggagggattttcgtccctccccctcaaataacgagttgaatccggattattgatccgggtcgatgatgaatttttcgttcatcatcagcttgacttcattgcgggctttcccgatcgtctccttggccatggccagaagctcctcggccgtgaacttgaaccgggccacgccctgctcgatggccttcatcccgacggccgcggcttcgcgggggaaaacttcccattcgtccatgttcgggacgatgtagtcctcgctgatccccttgtcctcggcgaccttggccagctcgcgggcggcggcgatgcacatctcgtcggtgatcgtcttggcccggacgtcgagcgcgccgcggaagatgcccgggaacccgagcgaattgttgacctggttggggaaatccgaccggccggtggccacgacgcgggcgccggcttccttggcttcccagggccagatttcggggatgggattggcgcaggcgaagacaatcgcatccttggccatggccctgatccactcggccttgatggttccgggtcccggggtggaaacgccgatcaggacgtccgcgcccacgacggcgtcggctgcggatccctgtttcgccttgggattcgtccgcatacagaggtcccatttctccttgaatttttcctggagaacggcccggtcggcccggtcgcgggaaagaatgcccttggaatcgaccgagagcatgttgtccggattggccccggcggccatgatcatcttggcgatattgatccccgaggcgcccgatccgagaacgacgaacttggccgcggcgatgtctttcttgacgagcttgagggcgttgatcacgccggcgacggtgacgcaggccgtgccctgctggtcgtcgtgccagaccgggatttcgcacttggcccgcagttcgtcgaggatccgaaagcacttgggctgggcgatgtcctcgagattgtaaccgccgaaggagggctggagggcccggccgatttcgatgatcttatccggatccttctcatccaggcagatgggataagcatcgacgccgccgaggtacttgtacaggatgcctttgccctccatgaccggaaggccgcccaaggggccgatgtcgcccaggcccaggacgcgcgttccgtcgctgatgacggccacgctgttccatttgttggtgtactcgtaggccttctgcggatcggcggcgatttccttgcagaccgcggccacgcccggcgtgtaccagatcgcgaaatcattgaagtcccgaacccggcacttcaaggcgacgcccagctttcctttgtaatacttgtgaaggcgcggagcgtctttggcgggctgcgcggctctcctgagaagttcctctaccgtaaccttttccatgcaagacctcctttgaaataaagagtttccgattatacctgattgaaaaaagagaaacaatactaaacggcgggaatttcatgaaaagtttcgttttaaaacggagaagcggacggccgtccgcctcaccgcagcagatcgtccaaggtccagacgagctcggcccgcgcgcgggcggccaagtcgatccggccggtgtccatccggatggcgtcctcgggacacgcctcgacgcagaatccgcagaagcagcagcgggtcaggtcgatctcgaaccggcccgcggtcttctggatttccgggtcgcggtccccggccgcctcgacgacgatgcattccgaagggcagacggtcgcgcagagaaggcaggccacgcaccgcggctttccgccgggccgcttcatcaagcggtggaccgcccggtatcgaaggggaagcggcttcgtttcctcgggatattggatggtcaccgccccgggccgatattttttcaggccgatcagccggaggaaatggaaccaaagattggagaaaaaatggcgggcggtgacgatcgtcccctcgacgagtgccacgagaaggcggaacgcgtttttcatcgcaggctcatgaccaagccggttcccaagacgttgagaagaccgagagggacgagcagcttccaccccagatccatcaattgatcataacggatccgcggataggtccagcggatgagaatctgaagccagcagaagaaagcgaccttgagttggaaggagaggacctggagaaagaggacgacgccgccggccatcgcccaatgtccgccccagggccagcgcacgccgtcgggaccgagccacggcgcctgccagccgccgaaaaacagcgtcgcggccagggcggccacgacgatgatctccatgaaatccgtcagcatgaaaaggccccacttgaggccgccgtattcggcgttgaagccgacgatctcggactctccttccggcaggtcgaacggcacgcgcttcgtctcggcgacggcggcgacgaagaagacgagaaagccgagcggctggagaaaaacgccccagcgcgggaggaagccgagaatcaacccgccttgataggccacgatctccgagagccgcagcgagggatagaccatgatcaggccgaccagggacagcccgaggccgatctcgtaggagacgagctgggccgcgccccgcagcccgccgatcaaaccccagcggttgcgcgacgaccagccggaaaggaggatgccgtaaactcccagcgagagcatcgccagaaggaacaagagcccggccgtgccgtcgtaaacctggagaaggacgggcgtcccgcggatccggaccgccggaccgaacggcaccacggcgacggccgccgcgacgaagaaaaaggaaacgaacggggccagggtatggagaaccttgtcggcgaacggcgggacgaagtcctctttgaaaatcatcttgatcgcgtcggcgaacggctgaaaaaggccgaacatcctcaggcccaggacccgggcccggttggccccgatccggtcctgcatgaccgcgctctgctttcgctcgacccacgtcagaaaaagagcaaggaggagaagccaccccagggcgacgacgatcttcaccaggagaacagaaatttcgctcattcccttttccctctccggacggcctcgagaagcgaccggaggatgcccccctccgtccggatgccttccgaaaccggccgggcggccccaaattcccgccgccgtccttcgacgttcgtgtagcttccggatttctcaaacgccgaggcgcagggaaggacgaaatcgaagagatcgtccgcttccgtcagaaccggcgagacgaggactttcgttcggatcgaccgccactcctccgggtggaggatccagggggtgacctctccgcggacgccggcgaaaacgaacaggagatcggcgcgggctcggagctcgtccaaatccaggggacgcagatcggctcccccggccgccaaggcgccgcggcggttgggcgtccgttccggcgtccggaggaatccatcgcctccgtcgtcggggggatcggccagccggaggagcggccggggatggaatccgtcccggaacatccgcacatcatcccattcttcgttggtcaatccggaatgaacgacgagcgccaggcggccggtccgttcggtctcgtccagggcccggatcttggcgcccaggagggcgaacgccttctcggcgctgagcacggcttccccgccgccgcccttattccagacgatcgcccgggcccggcgcgattcgatttcgatccaagcgtaccggccgacgtcgcagatccacggtccggccggggtggcgtcgggccggggacgaacgcggaagatgccgcctgtttccggatgccgggcgaagccggggtgaacatcgacctcgatcccgcagccgcggccgcagaacgggcaaatcgacggcttcggctccaaaaaccaggaccgcgtccggaaacgaaaggcggcgtcggtgatcgctccgaccgggcagagatcgacgaggttgccggcgtaaggcgtggccaccgccgccccctcgatgaagccgatctccgacccgccgccccggccgaaaacacccagctcgcccgtcttggcgacgtccctcagaaaccggacgcaccgggtgcaaagaacgcagcgctccctgtccaggatcagccgctctccgatttttaaaagcttctcccgtcgcgtcttcggctcgcgcaggtcgctcggaaaaagcccgtaatcccggtaataatcctggagccggcactcccccgccttgtcgcagatgggacaatcgaccggatgatcggccaggaggagctcgaggacgttccgccgggcttcggccacctgcggcgtttgcgtcgcgaccttcatcccctcccggacagccgtcgcgcaagccggctcgagcttggccgcgccctcgatctcaacgacgcacatgcggcaggagccttcgggagtcaaggccggatgatggcagaaacgggggatggaaatcccggcttgttcggccgcggccaggatcgtcgttccctcggccgtctccaggacccgtccgtcgatcgtcactttgaccatggcgctattgttccaattccgctcggaattttgtaaccaaagccaggatcggaacggccgccgcatccccgaacgggcagagcgtccgtcccttcatcgccccggccagccggacgatccggtcgagatcgccggcccggccctctccggccccgcgccggaggacgatccgccggatccaggacgttcccacccggcagggggtgcattgaccgcaggattcatgggcgtaaaaccggctgatccggtccaggaccgtcttcatcgaaaccgcgtcgtcgatcacgatgactccggccgatccgatcatcgagccggccgcggccagcgaggcgctgtccatgggcacgtcgatttctccgggccccaggacggccgacgacattcctccgggaatcacggccttgagcgtccggccgggagccaagccgccggcatggacgaaaacgacgtcccgcagcggcgtcccgaccgggagctcgtagacgcccggccggaccaccgatccactgacgctgaccagccgcgtccccccgtccttcggttttccgagaccgagaaaccaagacgccccgttccggatgacggcgggcagatgggccagcgtctcgacgttgttgatgaccgtcggcttgccgaacagcccgaccgccgccgggaagggaggcttgaggcgcggctgcccgcggaatccctcgagggattcgaggagagccgtctcctcgccgcagatgtaggccccggccccgcggtggacgatcacgtccagggaaaagcccgagccgaggacgctcgctcccaggacgcccgccccggcggcttcggcgatcgccttctccaagcgccgggccggctcctcgtattcgccccggatatagatgtacgccgtatgaacgcccacggcataagcgcagagaatgattccctcgagcaggaggtgcggatcgtgggccaggatgtgccggtccttgaacgtccccggctctccctcgtccgcgttgacgcacagataaaaaggacccggatccgtccggggaataaagctccatttcaccccggccggaaaacccgcccctccccggcctcggagctcggcggccttgacttcgccggctaccgccgccggtgtcatttcggccagggcccggcgggccgcggcgtagcctccgccgcggacgtaggcctccagcgaccgggggccggccgggtcgaacgtcgaggtgaggggtctttccgccatcggtcactccagctcccgcaggatcgcgtccagggcggccggcgtcaggttttcatggagcgtgtctccggccagcaggcacggccccttgtcgcaggccccgagacactcgacttcgaccagggtgaagcgcccgtccggcgtcgtccgtcccggctggaggccgaacgcgcggcggagatggtccaggatcccggcgcttccccggatggagcaggacaaattcgtgcagacgcgcagaagatggcggccggcgggctcgcgccggaacatcgtgtaaaacgtcaagacttcccggacctcgaccggccgcaggccgcagaggacggcggcctcggcctcatcctccggaccgatgaacccccgttcccgctggacaaggtgaaggacgggaagaagagcggcccgccggttcggatagcgggcgaggatcgcctcgatccgggtccgcagtcccgagggaaacgcgttcgtcaccggtccagctccccgccgatcatgttcatcgagccgaaggtcgggatgatgtccgccagcagccgcccctggatcaagccggccagggcggagaccacgtgaagacacggagcccgcaggtggagccggtaaggccggtccgttccgtcggaaacgaggtaaaatcccagctcgccgttgcccccctcgatcgccgcgtagacctccccggccggcggccgcaggccgtgtcccttcatgaaatattggaaatgggagatcaagccctcgatcgttccgtagacggcgtcttttccgggcaagccgtatccgggagcggatgtctggatgccgccgagaacgtcccgttcggcgccctcgagcgttggggacaagcggacgggggcctcgggcggagacgtccgggcggcctggatcgcctcggccggctcgatcgcggccgctttggcggccggccgctcccgccggagcgggccgagacactgctcgatgatcctcaagctttgctccatctcggccatccggacgaggtatcggtcgtaattatcgccccggtcgccggtcgggatttcaaattccaggcggtcgtacgtcaggtaaggccgggccttccggacgtcgtaggccaagcccgtcgagcgaagggccggcccggtccagccgtgggccaccgcctcctcgcggctcatcgccgcgacgtcgcgcgtccggccgagaaagatcggattccggtccagaaggcggcggacgtcccggagaacgcgccgggtttcctcgattccacggcggatggcggattcgtaatcagcctggaggtcggcccgcacgccgccgatccggatgtaggacgtcgtcagccgggcgccggtcgtctgctcgatgacgtcccagaggaactcacgggccttcatattgtaaaggaaggcggtgaaggccccggtttccatggccatggccgccaggcaggtcaagtggtcgcagatccgcgagatctcccccatcagcacccggatccactgagcccgctcggggatccccagcccgcagagcttttccacggccagggcgtagccgaggttgttgagaagcggcgagacgtaattcagccggtcggtgtagatcaggagattccaccaggtccggttctcgcaggtcttttcgaagccgcggtggagataccccacctcgacgtcggcgttttgaacccgctcgccgtcgagctcgagcatgatccggaccgttccatgcatggccgggtgggacggccccatgttaatcagcaggttctcggggcgggcggccgaaaccagcggggaggtcacggcgtctcctgtttcgaattcgaaggcagcggctgacgtccgcggagggggaaatccttgcggagcggatgcccctcgaatccttcatccaggaaaaggcgccggaggtcgggatggccggcgaagcgcacgccgaacatgtcgaagatctcccgctcgagccaagcggcgtttttccacatcgcggcgagcgaggcgatttcaggtcgaccggccggaaggtccgccttgacccggatccgccggttccgggcgagggaaaagaaatgatagaccatctcgaagcggccggggcggtccggataatcgacgcaggtcgcgtcgagcagcatcgcgtacccgggcggctcggccttgagaaggccggccgccggcaacagcgcctccgggcggatccgaacgaccggatcgccgaacgattctccttcctcgaggactgcgccgggaagggcctcgcgcagggcggtcaggatgtctttttcttccatcgccagtcctggccctcggccttgattttttcctggagcttgaggaggccgtcgagcaccgtctccgggcggggcggacagccggggatgtagatgtcgaccgggatgatttcgtcgattccctggacgacggcgtaattgtcgtagatgccgcccgaaaccgtgcaggccccgaaggccatgacccatttcggctcggtcatctggtcgtagactgttttcaacacgggggccagcttgcggttgatcgttccgacgacgagcagcatgtccgcctggcgcggtgaaaaccgggtcatgcccgcgccgaagcggtcgatgtcgtaatgggcgcaggccgtcgacatgtattccatcccgcagcaggccgtgatgaagggataatggaagagcgagtatttgcggccccaggaaagcagggcgtcgaagcgggtggtgaggaatcctccggccatggctctattcccagcggaaggccccctttctccaggcatagacgaatccggccgccagcacggcggtgtaggcgaggaggagaaggaacgccggtcccttcatttcccggaaaacgagggcccaggggaagagaaaggcgacttcgatgtcgaacaggacgaagaggaagacgacgagcggaaacttgacggcgaaaccggggatccccttctgaagcggcgggctgccgcattcgaaaggctgctccttgacggggttggtcttccgcgggccgagaagcgcgttcagggaaatcatgaccgcgccgagaaggccgaacaccaggaagaccaaggccagggtcatggagcattatcctcgcgggagcggcaggattttaatcccatttctcaattcaagcaatggatcgcccgtccgtcgactttcaaggccgcttccatgaccgcttccgagagcgtcggatggatatgaatcgactccccgatgtcggaggccttcaagccccgggtcatggccagggtgatctcggcgatcaagtcgctggcgcaggcgccgagcacgtgggcgcccaagatccggccgtccgccccggcgatgatcttggccaggccgtcgggggaattcatggtcagcgcccggccgttggcctggaaggagaatgtgccgatccggacctcgcccccttccgcccgggcttcttcctcggtcaggccgatcgaggcgaattccggctcggtgaagacggccatgggcagggcccggtaatcgacatggccgcgccccccggccgcgttctcggcggccgcgattccctcgtgcgaggccttgtgggccaggagttttccgccgatcaggtcgccgacggcataaatgccggggacgcttgtctccaaacgctcgttgacttggacaaagcccctcttgtcgagggcgaccggagaggcgccttccgagagcccgccggaattcggccgccggccggcggccagaaggaccttctcggtcgcgcaggcgaacggggcgctggttttcaggctcgtgcccttgagaacgaccaggccgtccggaccgcgctcgcagctttcgatccgggactgggtcagaaccttgaggccctgctttttcaacatgagctcgaaccgctggcccatttcccggtcgcagccgggcagggcggagggtaaaatctccaggacggtcacatcggtcccaagacgcgagtagatcgtccccatttccaggccgatcgccccggccccgatgacagccagggatttgggcggggccgccaggtcgagcatttcagtgctcgacaggatgtccgttccgttgaacttcagaaacggcagctcggccggacggcttccatgagccaggatgaccgccccggcttcataggcttgctcctccccctccccgttccgaacgacgatccggcgtccgccgcccagaaccgccgttcccttgacgacctcgactttatggctcttcaaaagaaattcgactccccggacgaggcggtcgatgactttccgtttctcttccagcacccgggtccagttcaacgtcacctcgccagccgggccgtcgaacgtcttggccgtccgcagggcgcgcagaaggctcgtctggtggagcaggtgcttggtcggaatgcagccgacgttcatgcaagtcccgccgatccattccttctcgaacaggacgacggatttccccagctgggccgcccgcagggccgcgacgtatcctcccggcccgcccccgatcaccgcgatgtcctttgtgagagtcatgatcttgtcctccgtcgtcgttttctcttttccgcggaaacgctaagatacccgaccgcgccgatattttcaatcttccgggccgctcggggagattccgaactcccggcctctttcctttttcgttgacaaccggaggccttcagaagaaaatacgatggctttgccgaaaacacgaacgcaaatccgaatctcgatttattccgccgtctgtctctgcctgtttttcttcctggcctcccctcctccggccgaagccggggccgagacgcttgtctggggccgggtgctcgacgccggcggacagccgatccccggggcggtggtctccgtctccggcgaggactttgaggaggaggcctcggtttccgccgacgcggccggctggtacgccctcgtcgggctccggcccggcgcctacgcgatccgggcggccgcccctctttacgcggccgtcgtccgcccccgcgtcgtctgcgagccggacggccgggtcttcgcggccttcaccttggagaaaacgggggccgggacgggatccgcggccgtcagggaagacctcttccccaacgggcgcgtgttcattccggcggtccagatcgagagcctgccgaccggccgttccgtcgactcgctgatcgaaaaccaggcctcgaccgccaccgccgaccggatcgacgtcggcggcatgtgggaggcggtcccctcgctgttcggctcccggggcgccgcctcctggacgcagaacgtcttcctctggaacggacaggacgtcaccgagccgttcgaggggggaactccgctcgtcgtccccgacctgttcgccctggaatcatttttcctgaccgattcggccgtcccgatccaggccctgaccccgggctcgacggtggacctcacgccctttagagggacgtcgtccttccatggcgcggtccagggattttatctcgacaagtccttcgcctcgtccaacatcacccccgccctccgggaagagggcctgacggaaagcgacaccttcaaccgcttgatggacgtctccctgcggctttcgggtccccttttcggcgggcgctggacgtatttcacgtcctggacggtcgacacggccgcccgcgatctggccgattatgagccgctcgacgaatcgcgcctggtttccggcctggttcatctcgtccgggacggcgaccgtcgccgcctccggctcttctggaccggccaagcggcaagccattcgtcggccggggcggccggcggcgttcccccggagacgaccgtccggaggaacgaaggccgccatctcgtccagatcctctccgaatcccggccgggcggacgatcctcctcccgctacgggctgagcttctgcctggccggatggaacgacgaccttcaaaacggagcctccggcgtccaacgaatcgagaaattcctgaacatcccggagggcacggccgcccaaacgggggacgaaaaacgcgttcgggcctcggtgtttttcgacggccggtcgtttttccgcaacgtcgtccggacccatcatcttttcgaatacggcgtccggctgcattacgccgggtccgagagcgcggcttccgttcccggcgatcttcgtcttgttttttatgacggccgcccgctggaagccctcgtcttcgattcgccgttccgccaccggcaagagacggccggcctcgacgcctacgtccaggacacaatcaacctggccggaggcgtctcgctgtccctgggcctccacggagccgccgtctacggccggggcgggggcggctcgatccagagcctcaatttctccccgcgcttcgccctccgcgtccctctgtccgcggccggctcctcggccgtccggctttcggtcgtccggtacttctggacccttcctctttcatggctggcctggggggatccggccgctcccggccggctggctttccgctggaacgacgccgacggcgacgcgggctggagcgaggacgagcgcggaccgcttctccgccgggaaggcccccgctacggggggatcgacgaaaacctccgcctgccctatacggatgagctgaccctcgccttcatccggggaatgggccggggctggatgatgtcgctggccggctttctccgggaaacgcggaacctcgtggagaccgtcaacaccggcgtgccgggcgcggcctatgatcccgtttcctttttcgacatcggcgacgaccggatctccggctcgatcgacgatctggaattcaccgtctacgatcagcggccggagacgttcggccgggatttccatcttctctcgaatcccggccatggttcccgcaaatccacctacgccgggcttgatttcattcttttcaagcggcccaccgacgaatccttgttcttcctggcgatgacggccacccgggcgttccagaccaacggcccggggaacacggcctgggaaaacgacgaggggatgatcggcccgctctacgacaatccgaacgccgggatcaacgcccatggacgtccccgcttcgaccgggcctacacaatccgcctggggatcagccacgagcttcccttcaagacgcgggccggcctggtcgtcaagtattacgacggccagccgttcacccggatgatcatcgtcgagggcttgaaccagggcccggtcatgatccaggcccacggccggggggtggcccggtatgaattcaacctgaccgccgatttccggctggaaaaaatcattccgttcccctttggatcgatccggctgatgttcgacgtcttcaatctcttcaacatgcaccaggccacgtccgaaaacccgtggacggggcccgagttccccctgcggtacgcgaccggcatccagtccccccggattttccggctgggtttccacttcgctttttgaggaggccgcatgctcccccctttggagaaagccctgttcgccctggccgtcctggccacggcggttctgttcctccggccgatgatcctccgcatccggatcatcgcggccgggcattcggagaaccggtccgaccgcccggtccggcggctgggcgccgccctcggcaagatcctgctccagcgctgcaccttgaaaaacgagcggccgttcaccggcctgatgcatgtcttcatcttctacagcgccctgaccttcgataccttgaccgtcaaccatacgctcgagggattcttttccggcttcagccttctcggtcacggccgtttccggatgttcttcgccctcctgaccgacgtgatggccgtcctagtcgtggccggaacgctctatttcatcgtccgccgctttctcctccggccgaaggcctaccggacgaccccgctcgattcggccgtgatctacgccttcctgatcctcgtcaccgccagcttcctttattatgaagccttcgccatcgccgcccgcggcggagcccgggggtacgcgttcctcggcaacctcctggccgacgcgatcaggggagccggggtgcttccggcggccgtcgcggcccacgagcacgccggctggtggctccatatcctgctggtcttcggtttcatcgcctatgtcccccattccaagtatctccacatgttcgccggctcgttcggcatgctggtccggcaacccggctcgggccggatcatcccgaccttggatcttgaaaactccgagacgttcgggatcgaaaaagcggccgatttctcctggaaggacaatctcgacgccttcgcctgcatggagtgcggccgatgccaggacgcctgcccggcgtcccgcacggacaaggcgctatcgcccaagatgatcctggtcgacatggagaagaacctcctggccgagcggaaggccgtcctcgcccgcgaccgggacgcccagaagcctctcgtcccggacgtccacgccgaggacgaaatctgggcctgcacgacctgcggcgcctgcatgcacgtctgcccggtcgagatcgagcacatccgcaaaatcgtcgggatgcgccagagccgggtcctgatggaaagcaagttccccgccccgctcaacgccctgtttcgcaacctcgagacgaacgccaatccctggggagtcgggttcgccgagcgcggccgctgggccgagggcttgaatctccggacgatcgccgatcacccggacgcggaatacctcttctgggtgggctgcgccggctcattcgaggaggagggacggcggaccgccagggctttcgcccggcttctcaccgcggccggcgtcgacttcgcgatcctcgggaccgaggagaagtgctgcggcgacgcggcccggcgcctgggccatgaatatctcttccaatccttggccgcggagacgatcgagacgttcgcccggcacaaggtccggaagatcctgacgacctgcccccacggctacaacgccttccggaacgagtacccgcggctggcctcgggcctcgcctccttgagccccgaagcccgggcccatttcccccgcatcgagatccgccaccattccgaattcctgctcgagctgatcgcttccggccggttgaaaccggccccggggaccgggacaaggatcgcctaccatgatccctgctacctggcccgccacaacggcctggccgacgccccgcgggccgtcctccgggccgcggccggggctcccccggtcgagctcgccgacaaccgcgaacacagcctctgctgcggcgcgggaggcgggttgatgtggacggaggaaacggccggaacccggattaatcatctccgggccggccagatcctggaggcggatgtggccgcggtggccacgtcctgtccgttctgcctgacgatgctccgcgacgccctcgtcgacaaggaccgggccgacgtggccgtccgcgacctggctcaaatcctggtcgaagccgccggcctggccgcggattgatccgccgcgcggccggggggcacgtccgacgtcccgggaagcgccggccgccgcgacaagagggccggggacgcttaggatccctgtttgttgttcgtatactttgaaatcagggtcgagcgcagatcccgataggccttgacggcccggtccatgttcgtccaggcggattcggtcaggaacgtccgggcttggccggggttcttcttcatcagctccaaggccttcttgtcgacctcgggcaatttttccaggaactctctctccagcggatcccggacggcccgcaggtcgcggatcgcctcctgccatttcagatagaggagattctcggcgaagtcatacacccagcgggccgagtcttcgctgaaccggtccgggtcgtaggtgctgtagagcggattgatccgctccacgccggcgtggatcgggacgtagatgccggtgtattgattgtccagatagacccagtagacccctccgatgggatcgggaagccagccccggagctgggcgatcattccgtaattgccgcgggcgacgttgcgacgcgaggaaattttcagcagctcccgcatggggcgggtgggaaacggcgtggtcagggggctcagcttcatccccccctggccgtcggggatcagccagtcgggatcggcggtcatgtcataaatggtcccctcgttgaccgagcgctggagtttcatgagatcttcgacgccgagcggcttttcgggcttggccgagaagggatagagcgaaaggggttcgacgtactggtggtagggatcgatcccgctgaaggggcccgtgatctgccgttccggccaagcgcgaagccggggcgcgatcgtctggaaaaacagccaaaaccgcccggtggcccactcccggggaatgggggcgtagatctcctgccaaacaaacggcttgccggccgccggatcgtaccagccgcggtcgatcgcgaactgctgatagttgctcgaagccatgaaccagtccggcttgtcaaggtcgatctccttgatgatgctccaattggggacgatggcggcctcgtcgtccggcacgcgctgggcggcccagatcactccgggaatccccttccccggttcccagcccgggccgacgctgaacatctccatgatccaagcctcgtcgggatcggcgatgcagaggtcctccgactcgggcccgcaggaagggaggaagccgtaggtctccatccactccccgatcatggccacggcctcccgggcccgcttgcagcgctgaagggccaaggccatggcttgctcgaccgtcatgatctgcttagccccctcgcgctcgacccggagctcctccctctggctggtggtgctttcgccgatggccaattggtgttcgttgatgtgggggtagccggagtggatataggaataggtccgctccgcctgggggatgcggccgatcacctcgccgaaatcgcccaggggaagcgcgacatcctgaatcccccaatgaagaggcgccagcgttcctttcgggaacgtccgcccgggcaccaccatgaggcgggaattattgcaggtgtcggtgtgggaattgagcaccgatccatcgaccgtcgccttcttcccggccacgatgatcgtgcagggatggacggccgacgccagggtgaaaaccatcgtcagcaggcagacaacgcttctcggtttcatcatgtttctcctctcacatcggaacggattcattctttcgggctcaggccgcgccggtcacgggaaaaaacggatggatctactgaacgaccaggacggcgggcgcgccttcccgggaggcgctgttcaccgcgacgatatggtacgtgtaggtcttgtccttaagcaccccgcggtgttgaaactcgacggcggtctcgagcagggcgatctccgtcttcttcgtcccctccacttcgtagagccggtgaaacttgatgtcgacgttgtccggattgggctcgaaggtgatcaggttgatgtactcggcctgggaaaaggaacggttgaggatcttttgcccggaggcgctcaggggggcgtaaatattccggaggaagttggccgtggcggtcttttccatgtcgaccacgatgtcgacgggattctgcgtccccgagacgtcgcccgtccagccggtgaaggcataatgcgtctccgggaccgcggtcgcccggacgatctgggtcgtgccgtagggatacacgtacgtcccgggtgacgggacggttgtgcctccctccgtcgccttcagcgtcagtttgatccgaatcggatggattccgatcacggcgtagtcccactcggcgtcgccgaaatggtaaatgtggtccacggaataatagttgtcggcgaatcctccccagcccatgttgatgtggagctggttggacggcgaggtccggtacccgtcggccaccacggcgtggccggactcctcggcgcggttatagatggccatgatcaccggctggtgaatctccacctcccgccggatgacttcgaaccaggcttcccagcttccggcttccgcccggtcggtttcatgggcgtccgggctgtacttgaagaacgccgtcagtgcgtcgttgtcgttgatgtaagatcccgaaccgtcgaccgcatattgcatgtcgatggagatgcccacgtccgaacagagccgggccacggcgtcggcttgggcggccgtgtaagtgccggcgtagtaggtgtcgcgcatcaagctccaatggtaaggatggttgaaatccgcgctgagggtctggccgttccatgtataggaatggctcccctggccctgggcggggtgtttccaataattcatgacctgggccatggccacggccgagcaccccgccggggtcggctcgccgcccacccggggcgtatagttccaaaaaggcgtgtcctggttccacttggttgcgagaaggggggtgacctccgccgacggtgatccgtcggcggaacgggcggcggcaacctcgccgcgtcccagggcttcccagcgccgctcgttccgattcaccgcttcccggtccggtgattccgcggccccgcggcctgcggccgccggcccggacgccgggagataacgaagctggaccttggcatagtcgaggcggtcgagaaggcgggccaagtagggaatccgggccatccggtccggatctccctcgtaggagacgaacacctggggcgatccctcggtgatgtccgacaggatcatgaatccccgcggctcgagccgggccaggtaggcgaccggacggccgcggcggagcaggggctcgacgcggccgagggcgaacacgcccggcgtcaggcggagatcgggccgggcgttttcgaattccagaaggcgggcggccgctgtccgggcctcggccggacccacgattcgggcctcggccgcggcggccgcggccaacaggatgcagacggcggcgatcagggccgccggccgagcggacttgggcttcgtcatattcataaactcctcacggatgaattgtcctccgagaccgcccgtcaaccgagaatgtcccggaacgcgccgatcgccgcgtccacgtccgcgtcgtcgacgtccttgtgggtgaccatccggatgccgacgccgcccggcgcggcgagagcccggatgcctctcttttccagctccgaaagcaagccggggaccgtaagctccggatgctcgaacttgaaaatgatgatgttcgtctccacttcggccgggttgaggacgattccgggcatggccgagagggcttccgccagccggcgggcccggcggtgatcctcggccaggcggccggtcatccgggtcagggcgaggagaccggcggcggcgatgacgccgacctggcgcattcctccgcccaaggccttccggatccgccggccgtattcgatgaagtccttcggcccgacaagcatggagccgatcggggccgaaagccccttggacaggcagaacatcaccgagtcgacttcgtccgcatagccgcggaccgggacgcccgaggcggtcgaggcgttgaaaatccgggcgccgtccaggtgaacccgcaggccgtgacggaccgcgacctcccggatcgccttgaaattttccagggggacgaccgccccgccccaattgttatgagtgttttccagacagatgagcgtcgtctggggcgtgtggacgttcggcttcttgacgaaatgttcgacctcggccggatccatggccccccgccgcgagggaagcggacgcggcgtcacccgggagatgaacgtcaggtgggtggattcgaggttgaaaatgtgcgaccgggattcgacgatgacttcctggagttcttgggtccaggccttgacggcgatcgaattgcccatcgtcccggaggggcagaacagcccggcctccttgcccatggtttcggcggccagggcttccagcttctggaccgtcggatcgaatccgatgacgtcatcgccaacctccgcctcggccatcgcttttctcatttcgggggtcggccgggtgacggtatcgctgcgaaaatcagagggattcattccggacctcgctttcttcagggcattatagcgcaacggcgcggcggtttgcaccggtgaatgctttatgatacattttttcccgactctccgggacagaaagtgaatggcctcctcgacgaaggcgaacagcatcctccttttcgtccttctctatctttttctttttttcgcctcggccgacatcttttccgagctcatttaccggggtgagctgatcaatttgcccgaactcacgggcaagaccgtggaggaggcccgggcgctcctggctcccaagaaaatcagcctggcgaccgtcgattcccggttcgacacgcgcttggaaaaagggcggatcctgacccaggatccggccaagggatcccgggtcaagccgcgccggacggtcggcgtcgtcgtgagcctggggaacgaacagatcgtcgtcccccggctagagggccgcagcgtcgagatggccgcccaactgctcaaagcggccggattgcgccggggccgcgtttcccagatccataccccgcaggccgcggccggccgcatcctcttccaggaccccccggccgggactgtcgtcaaccgggcttcggcggtggactttctcgtcagccgcggccaggaagacccccgctacatcatgcccgatctcatcgcccggaacgcggactccgtcctgcggcagctgcgatccctgggcttcctgaaatacgacgtcagctacgcctggtatccggatatcggccccggggtgattttaaagcagagcccggtcgccgggtccctgatcctcaagcgcaaccaaatccatttcgaagtgagccgctgacatgatccagatcgccccttcgcttctttccgccgacttcagccggctggccgacgccgcccatatggtcgagaaggccggagccgacctgattcacgtcgacgtgatggacggccatttcgttccgatgctgacgttcgggccggcccatgtcgccgccctgaaaaaagtcacagccctcccgttggatgtccatctcatggtcgacaacccctcggcgatgatccccctcttcgccgaggccggggccgactggatctcgatccacgtcgaggccgccccccatctccaccgcgacgtttcggccatccgccgggccggccgcaaggccggcgtcgttctcaacccggccacgcccttgaccgccctggaggcgattcttcccgacgccgatttcgtcctgttgatgagcgtcaacccgggccgcggcagccagccgttcatcgaggcttcccacgagcggatccgcctcctccgccgccggatcgaggaacggggccttcggacgctcgtcgaaatcgacggcggcgtcaacctcgagaacttcgagcgcctctgcgaggacggcgcccaggtgttcgtcgccggaaacgccgtcttcggcagccccgacccggccggggtcatccggacgatgagggacatcgccgcccggaaggagcggcgatgaaagtcctggtcacgggagccgccggattcatcgggtcccgtctctgccggcgcctgctggacgaaggctgcgacgtctgcggcctggattgcctgacgaattactatccccggtggatcaagcggcggaatctccgtcccctgcaggccgaccgccgcttcaccttcatcgaggccgatctcaacgatctgcctctcaaccggacgctgcgcccgttcgaggcggtttaccacctggccgcccaggccggggtccgggcgagctgggggcggagcttcgcctcctacctccatcacaacatcgccgccacccagcggctcctcgaggcggccaaggaacggccgccgcggaaaatcgtctacgcctcgtcctcgtcggtctacggcttgacgcccgatttgcccatgaaggaaacgagcccgcttcggcccatttcgccttacggcgtgaccaagctttcggccgaacagctcggcgttctctatcaccgcaatttcggcctgccggtggtcgccctccgcttcttcaccgtctacggccccggccagcggccggacatggcctttcacaagtttttcaaggcgatcctggaagggcgggaaatccccgtgttcggggacggcagccagacccgggatttcacctacgtggacgacatcgtcgcggccctcgtctccgccgagcggaacgggacggccggagagatatacaacatcggcggcgggcaccgggaaaagctgtccgacctcttccccgtgttccgggaaatcaccgggcgcccggtcaaaacgcgccggatggaacagcaaaaaggagacgcgccccacacgttcgcggcgatcgccaaggcccggcgggacctgggctaccggccgcggacggcgctccgcgacggcctcgagcgcgaatgggcctacgttctcgatctttatgacaagcggagccgtcccgcgacgactcaaggaagcctctcatgaaaaaacacaagggagccgccgccgtcctggttctggcggccgcgctcgctctgacgcccgggtgccggaaacaacaggcggtgatctccccggacatcgccggttccgacgaagccttgttcaagcagggcgaacagctgatgaaaaaaaatcccgacaaggccttgatcctgttccggcaggtcatggaatcgttcccccagagcttctacgcccagcgggcgatgctggccatcgccgacacgtactttcagaaaaaggacgagggaagcctgatcctggcggccgcccagtaccgcagctttctcggtctctacccgaccagcccctcggcccccctggcccagtatcggatcggcctttgttcctacaacaaaatgctgaaacccggccgcgaccagacgaaaaccgaggaagccctggcggaattcaagaaaacggtttccatgtttcccctgaccgaggaggcggagtcggcccgggccaagatccaggaatgcgagaaccgcctggccgagcatattttcgtcatcggggagcattattaccggaagaggtcctaccgtccggccatcagccgcctgaccgacgtcgtgatgaattatcccctttacccggaaatggacaaagtctacttcatcctgggcgactcccaataccgtcagggaaaacccgacgaagcccggccgtatttcaccaaggtcgtgaccgattacggcaacggcaaatacgcctccaaggcccaaaaaaagctgaaggaaatcgaggacgccggaagaaagaaagccgcggaaaaaactccggccccccaaaaacaataaggagcggaccatgcccttgcgcgcccgatcgatcgccgtcttgatcctgggggcggccgttctcgccggtccggcggccgccgcggcccaggaaccggcgccgttctaccgcatccatgcggggatcgaagccgaggccggctcccggatggtcgtttgggacaaggacgccggctcctcttttctgaaatcgatccgggggaggatccgtttcgggctggagctgtccggcggggcgtcgttctccctcctggccggcggcggcgcggaaaactggaacggcctgatcttccggcacctgcccttttccgtcgactacgaggccggatcgcgcggcgcgatcgtcctcggggcggagatggaggttcccctgttccggccgggagactgggaaatcggcgccgccgtccaggctctcttttccctcggtctcaaaggcgaatggacgtcggaggcccttcagcagccggcccggctctccggccgggcctcgggcacggccgtccgcctcggccccaccctcgcttaccggggattcgagacctttacgcccaccgcctccgttttctatgacggcctctggtcgtcgttcaccatggaagagacgatcggctcgctcagcggttcggaaaaaaagaaaatcaacggccgcggatccgtcggcgcgtccctggggatgatcatcgaaccttcggcgtccttccgtttgaaggccgaaggcttcctgatccccggtaagaagctcgagggcggctggaatctcagcccgggggccgcggcgaggatggaattcctgttttaagggggaggatcatcatgacccaacggccggccattctccgattgctcgccgcgggcgtcttgatcgcctgggtgcttccgatgagcgccgggctcgtcggggatgtccgtcccaagggatccgccggaccggcgtccggattcgacccgaacgggacgtacgcgcccggagaagtgttgatcaagttcaggcccgaaatccccccggctcaccgggccgccgccatggccgttcaaagagtccggccgatcggccggatcgccgccctggacgtgtaccgggtccttcttccggaaggaaccgccgtcgaggagaaagcggccgccttggccgccgatccccgcgtcctgtacgccgagccgaattacatcggacgggcgtcggtcacgccgaacgacaacctgttcaagtatcaatacgccctgtccaacatcggccaatcgatcggcgacgttccggggagcccccagggaaagaccggggccgacatcaaggccacccagggctgggaggaatcccggggcgacgccgcggtcacgatcgcgatcgtcgattccggcgtcgagctgacccatcccgatctggtcggaaaaatcgtcggcccgggccgtgatttcgtcaacgacgattacgacgcgtccgacgacctgtaccacggcacggcggtcgccggcatcgccgccgcctccaccgacaacggcgagggcatcgccggggtcggctggaacgccatgatcctgccggtgaaagtgttgaacgaccagggaacgggaacggtctcccaagtcgccgacgggatcgtctgggcggccggccagggcgcccaggtgatcaacctcagcctcggattcaacgacgtcagccaggtgctgttcgacgcggtcgcctatgcctccgaccagggctgcgtcctcgtcgccgcggccggcaacaacggcggccccgtccagtatccggcggcctacaatgattacgtcctggccgtggccgcgacggattacaacgacgacgtctgggaaggctccaacgccggacccgaggtggacgtggccgccccgggcgtgtcgatcctgacggccgtgccgacgtggtttctcggttccggtcctttgccgtacagccggttcgacgggacgtcgatggccgccccccatgtctccgggctcgcggccatcctgaaaagcctgaaaccctggctgacggccgcccagatccgggaaatcatccgtctcagcgccgacgacgtcaacgcggcgacgcttccggggatcgacgactccatcggatgcggccggatcaacatggccaaggccctggtccccctgaagctcgaagccggccgtccctgagtcctccgccgaatgatcaagtacctccgcctccgcaacctggccacgatcgaggatatccggattgattgggagaacggattttccgtcctgaccggcgagacgggggcgggaaaatcgatcatcatcgacgggatccgcctcgtctgcggtgaaaaaggatcggcggatcttgtccgggccggagccgccgaagcctccgtcgaggcgatcttcgaccggccggccggcgaggagggcgaaggcgacctcatcctccagcggcttctcgccgccggcggaggcaaggcctaccaggacggaatcctggttcccttgaaaaggctcaaggaaacgacggccggcctcatcgacgtgtacggccagaacgatcatatcttcctgcttcagatcgaaagccatctcgcctacctggatcagttcgccgggacgatccccctgcgcgaggaaaccgcccgggccgcccgggagctgcgcggcctggcccggcagaaagaggaatggaccgcccgggagcgggagcgcggccagcggctcgatttcctggagttccagatcgccgagatcgaaaaagccgggctccgccccggcgaggaagaggagctgcgggaaaagcgccttctcctccggaacgcggaaaaaatccgcggccttctcgacgcctcctacgacttggcctacggcggggaggcttcgctgtccgccgcgctcgtcaagctcgaacacctgctccaggagctgagccccttccatccggatttccgggagatgaaggattccctctcctcgttcgggatcaccgtccgggagctttccgacctgctcctccgtttccgcgaccggggggaggaatcccccgagcggctggaggagatcgaggaacggctgagcttgatcgaacagttcaagagaaaatacggggcggaaatcggcgaaatccagggctacctcgaccgcctgaaagccgaacgcgaggatttccttcaaatcaaggaccgcctgctccgggtcgacgcggacatcgccgcggccgcggccgtttatgccgcctcggcccaaaagctgtccaagacccgccggacggccgccggcgagctgtcttccctgatcgaaaaagagatcgccctgctcgggatgaagaacgcccgcttcgaagtccgccttgacggccggcctttttccccggaccagcccgactcggtccgggaagccggcttggacgacgtcgagttcctcatctcccccaatccgggggagccgcccaagccgctgcggaaaatcgcttccgggggagagctgtcgcggatcatgctcgccctcaagtcggccgcccgggaaaaagacgcggcctccaccctgatcttcgatgaaatcgacgccgggatcggcggcaagacggccgaattcgtcgcccagcggcttaaggcgctcgccgcccgccaccaggtcttgtgcatcactcatcttccccagatcgcctcgttcgccgcccaccattacacgatcaccaagaagaccgagaaagaccggaccttcaccacgatccggaagctcggcccggatcagcggatcgaggaaatcgcccgtctcatgtccggaagcctccagacgccggcctctctggccggagcgcgggacatgctggagcgaaacgccgggccctgactcctcgcggaagcgcttcggggaacggatttcctcaaaccgccggccttaggtacaatagcgcggagaaatcaatcatgtccaaaccagacgccgccggccggttgttccaggccggcttcagctgttcccaagccgttttcacccccttcgccgaagacgccgggctcgatacggaaaccgccctcaagctcagccaggcgctgggcggagggatggcccacctcggcttcacgtgcggagccgtcaccggcgcgttcctggccatcggcctcaggcacggacgcgtccgggtcgaggactcggcggccaaggaaaaaacctacgccgtcatgaccgaattcgcccggcggttccgggcccgccacggcgacgatctctcgtgtccccccctcatcggctgcgacttggccacggccgcgggccaaaagaaagctcgggacggaaatctctttcaaacgcgctgcgcgacgtttgtccgggacgcggccgcgatcctcgaagacctcctccgatgaccgcccccggcccccctctcggcggactgcggttcgccgtccacaccttcggctgccagatgaacgagaacgactccgagcggctggccgggtttcttcgggccgccggggcttccccggccgcctcggtcgccgaagccgatctcgtcgtcgtcaacacctgctcggtccgggccaagtcggaggaaaagctgcagtcctttttgggacgcctccggacgctgaaaaagaaacgcccgcttctcgtcggcgtcgccggttgcgtcgcccaactccggaaggagagcctggccggcccgaaatccggcgtcgatttcgtcctcggattcgaccagtatgaccggatcgccgaagtggccgcggaaagcgcccgccgccgggtcgtcgccgtctcccggacgcgcggctggcgggagaagaaaacggcccctctccgggaaagcgccgtcagcgggtatgtcacgatcatggagggctgcgacaatttttgcgcctactgcgtcgtgcccttcacccgggggcgggaaaagtaccggccggtggaggcggttttggaagaagtccgggagctggccgcccgcgggtaccgggaaatccagctgctcggccagaacgtcaaccattaccgcgacccggagtcggggacggatttcgccgccctcctcgggcgggcggccgccgtccccgggccggaatggatccgcttcctcacctcgcacccgaaaagcttcccgcccgccttggcccggacgatggccgccacgccgaagatctgccggcagctccacctgccgcttcaatccggctcggcctcggtcctcgagcggatgaagcggggatacacccggaaagactacctggaaaccgcggccgcccttcgggctctcatgccctccatccgcctcagcgcggacatcatcgtcggctatccgggcgaaaccgaagccgaattcaaggaaaccctctcggccctggccgaaatccgcttcgccggcattttctccttctgctattcgccgcggccgcggacggccgcggcccgcttgacggacgacgtcccggctgaaatcaagaaacggcggctgatggaggttcaagcccttcagaaagacatccagctggcctttcataaaacgctgatcggggggcgggaacgtgttctctgcaccggccggagcaaaaaggacccggccgtgttcgccggccggaacgagggaaaccaggtcgtcaatttccggtcgaacgccaacgtcgtcggccggttcgtcgaggtcgaaatcacggacgcgggcccttacagcctgcgcgggatcgccgtcgccggatagcggagcgcggttaaaaaaacgcccgccccgtctccggagcgggcgtcgaatcgtcttaaaaaactccgatcacagaaggtgaaccacaaccgtcacgccggccatgacgatcgcgaccatgctcatgagcttgatgaggatgttcaggctggggccggacgtgtccttgaagggatcgccgaccgtgtcgccgatgaccgccgccttgtgagccgtcgagcccttgccgccgtaatggccttcctcgatgaattttttggcattgtcccaagctccgccggaattggccatgaagacggccaggacgaagccggtggaagtcccgccgatcaagaggcccatcactccggggacgcccagaagaaggccggtcacgaccggcagggcgatggccagcagcgagggtaaaagcatcgcccgctgggcgcccttggtcgagatggacacgcatcgggcgtagtcgggctcggcctggccggtcatgatcccggcaatctcccggaactgccgccggacctcgtcgaccattcgggaggcggcccggccgacggccgtcatggtcaggccgcagaacatgaaggccatcatcgccccgaggaagattccgatcaggacgatcggattcattaggttgacgttgtaataccgcatgaaatccatgaatccggcccgggccgtatcgatcgtcgttccgtcggcgaattcgatgatcgtccgcccgatccggatcaatccgaccttcagctcctcgacataggaggccaggagggccagggccgtcagggcggccgagccgatggcgaatcccttgcccgtggccgcggtggtgttgcccagcgagtcgagggcgtcggtccgcttccgaacctcctcctccaagccgctcatctgggcattgccgccggcgttgtcggcgatcgggccgtacgcgtccgtcgccagggtgatgcccagggtcgacagcatcccgacggcggccatgccgatgccgtacaggccgtgactgacgttgttcaggtcgaaattcgaggcgaagaggaacgccaggatcgtcccgacgacgacggccaggaccgggatcgtcgtagacagcatcccgacgcccaagccggcgatgatgaccgtggccggaccggtcttggcgttctcggcgaccgtccgggtcggcttgtaggaggccgaggtgaaatattcggtagcccggccgatgacgatccccgaggccaggccgacgatcatggccagccagacgcccaggggaaggccgagcagcttgatgaccgcgaacgagacgatgacgatgccgatcgagctgccgttgacgccgcggccgagggcccccaggagctgtttctgggaagcgccttccttcgtccggacgaggaaaatgcccaggatcgaaaggagcgtcccgacggcggccacgatcatgggggcgatgaccgccttgagctgcaggtcgggagtccccaggaaggccgaggcgcccagggcggccgtggccaggatggagccggcgtaggattcataaaggtccgcgcccatgccggccacgtcgccgacgttgtcgccgacattgtcggcgatgaccgccgggttccgcggatcgtcctcggggatgtcggcctcgactttaccgacgaggtcggccccgacgtcggcggccttggtgtagatgccgccgccgacgcgggcgaagagcgcctgggtggaggcgcccatcccgaacgtgatcatggtcgtggtgatcaggatcaggttgtgcccgccgtcgttgacgggatagatggctttcaggataagaaaccagagggagatgtcgagaagggccagcccgacgaccacgagacccatgaccgccccgctgcggaaggcgatccgcaaaccgctgtcgagggaccggcgggccgcctgggtggtccgggcggccgcagaggtggccgttttcatcccgaagaacccggccaggccggagaagaatccgccggtcaggaacgccaccggaacccaaggattctgaaccttgaagaggaaggccaggatcgccaggaagatgaccagaaaaacaaacacaatcgtcacgaccttgtactgttgcttcaggtaggccatggccccctggcggacgtacagggcgatttgagccatgcgctcgcttccctcgggggctttcttcatttggtgatagaaaaaccaagcgaaaaacaacgccaggatcgatccgagaggcgcgagccagaacaggtgtgcggccatcgtcttctccctcaaataattaaaatcgggctccggtttcggcgaaccctccccggaggtggcgcttaatatataaaaacccgcccgtcatgtcaaaatcccctccgccgccggacggatcgcaaaaaccggcgaatttgaactccccgtctctttccgatataatgtttcattccgaccggatcccccaaaatgaagaggatgtcttgaaaatcaacgtctggaataccattctgcagctcagcaaggagcgcggtgtggagccgaaagtcatcgtcgcggcgatcgaggaatcccttcgggtcgcggccggccggatttacacgcggaatgaggacgttcaaatcaccttcaagcccgaaaaaggcgatctgcgggtctattgcctgaaaaccgtcgtcgaggcgccggccgacgccggccgggagatcagcctgcccgaggcccagcggttgaaagccgacgcggccgtgggcgagacgatcgaaatcgaccttccgtccgacaccctcggccggatcgcggcccaagcggccaagcaggtcctggtccagaaagtccgcgacgcggaatcggaaaaaatatacgacgcctacgccgatcggatcggggaaatcgtcaccgggacttaccggcggatcgaaaacggcgccctgatcctggacgtcaataacctggacgtcgtcctccccccctgggaaatgatccccggcgagacctacgaccgaggcgcccagatccgggcggtcatcgtccaggtgcggcggggacagaaaggccaggagacgcagatcatcgtctcccgttccagcaacgagttcctcgggcgcctccttcaaacggaaatccccgaaatctcgtccggcatcatcgagatcaaggacatcgtccgccagcccggcgagcggtcgaaagtcgccgtgatcagccgggagcgcgatgtcgatccgatcggcgcctgcatcggccccaagggaagccggatcctggcgatcagcaaggaactcgacggcgaaaaaatcgacatcgtcctctggtcgcccaatccgggagcctacgccaagtccgccctgaacccggcccggatcgagcgcgtcatcccggtctcgacggccgataaatcgctggaagcgctcgtctcccgggaccagctttccctggccatcgggaagaaaggcatcaacgtcaagctcgcctccaagctgaccggttggaagatcgccatcaaggagctgggttaattttttcaaaggaatcccccgtgagcgaaaagaaaacaacgaaaccgaaaaccaaggccgccgcgacgcctcccgcctccccccctcctcccgcggtcaagccggcggcgcccgctcctcctccgtccgcttccaagcccccggcggccggaacggccccgaagaaaagcgccgccgcggccaagccggccgcccccgcggctccggcgaaagcccccgtttccgctccgtctcccgcgcccaagccggccgcctccgcgactccggcgaaggctcccgtttccgctccatctcccgggcccaaggcggccgcccccgcgcctccggcgaaggcccccgtttccgccccgtctcccgcccccaagccggccgccccccggccccggccccaagcccgcctgcgggagggagccacgatcaaggacctggccgaccggttcaaaatccggccccgggatctggccgacaagctcgccgtcaaggggtacaacctggcgatcaccgatatcatcagcccctccctggccgcttccctggccaaggatctcaacatcgttctcgacatcgtcccggtggaggaatcctgccgcctggaagcggcggcccgtccggagctgttggcccatcgtccgcccgtcgtcacgatcatgggacacgtcgaccatggcaagaccacgctgctggacgcgatccgcaaatccaacctggtcgaccgggaatcgggcggaatcacccagcacatcggcgcctatcaggtgaccgtcaataaaaaggcgatcacgttcatcgacacgccgggtcatgaggcgttcacccagctgcgggcccggggagccaaggtgacggatatcgtcatcctggtcgtggccgccgaggaagggctcatgccccagacccgggaggcgatcaatcacgccaaggccgccggcgtccccctgctcgtggccatcaacaagatcgacaagcccgaagccaatccggaccggatcaagcgggagctgcaaaaagacggattgctcgtggaggaatggggcggcgatgtcatcagcgtcgagatctcggccaaggaacggaaaaacattccggagcttctcgatatgatcctcctgatggccgacgttctcgacttgaaagccaatccctccgccccggcccagggcgtcgtcctcgaagcccggctcgatccccggaaaggcccgatggccacggttatcatccagaacgggacgctccggcccggggacacctttctttccggaacgacgttcggcaaggtccgagccatgaccgacgacctcgggcggacgatgcccgcggccggaccgtcctcgcccgtggagatcctgggatactccgatgtcccccgggccggcgatttcctccaggtcctgccggacctggagacggcccggcgcatcgccggacaaagaaaggaagcggccgccaaggccgaaccgcaaagacaagaggccgtcgcctcgctcgacgaccttttccgcaaggttgaaaccggcgcggccaaggagcttcccttgatcatccgggccgacgtccagggctcgatcgaggtcctgaccgggctgctcccttccctcggaaccgataaggtcaagatccgcatcatccaagcggccaccggctcgatcaacgaatcggacattgtcctagcccagacgacccaggccatcatcatcggatacaacatcaagccgtccccgaagatcctggagacggccggcaaggagaacgtcgagatccggacctacaagatcatctaccagctcaccgacgacatcaagaaggccctgaccgggcttctcgagccggtgatcaaggaaacgttcctgggccgggcccaggtccggaagatcttccggatccccaaggtcggcacgatcgccggctgctatgtcctggagggcaagatcgcccgcagcgctgaaatccgcgtcatccgggccgggatcgccgtccacaagggccggctctcctccctcaagcacgtcaaggagaacgtcaacgagatcaaggccgggtacgaatgcggactcggcctggccaacttcaaagacgtccaggaaggcgatctcatcgaggccttccagatcgaaaaagtcagcgccgtctgaagggggcgcgggtcatggtcgtcggccttctgctggtggaaatccattttccgcacagccggtccttgaaagacaagcgccgggagctttccggcctcaaggcccggatcaagagccgtttcaacgcggccgtggccgagatcgattttcacgaaaaatggcagcggacggccgtgggcgtcgtcaccctcaaccatgatcacctcgtcgtcgagcaggtcctcgagtccgtccgaaaggacatcgagagccacgtccagggcgagatcctgagcgcggaaacgaggtatttctaagatgcggacggaatcccgccggcagaagaggatggccagccttcttagggaggccttgagcacggttcttccggcggaattgaggccgtattcttcctccctggtctcggtgacccgggttgaagtcccggccgaccttcggacggcccgcgtccttctgagcgtcttcggcccggccgatccggaggaggtccgcggacacctcgagcgccggacgggggccatccgtcatcgtcttgccgcggccgccgaattcaagtataatccgcagcttgttttcgtgatcgacgcctcggccgatacggtcgagcggatttcacggattgtggccgagaatgcccatgacgataaaacccgttgacgagatcgtccggaagatccgcgactgccggcgcctggccgtgacgtcccatctccggcccgacggcgattccctctgctccggcctggccctggtcgaggcgttcgaggggatgggcaagaccgccgattatgtcatcaccgacccgatccccgtccccttcaacacgttttccgatttccgccgcatccgggtcggccaattggcctcgacgggctacgacgcggtcgttcttctggaatgcgccgacgtctcccgctccgggcagaccggcttggacggctatttcaaaatcaacatcgaccaccactattccaacagccattacgccgacatcaactgggtcgacgccgaggcgccggccgtcgccgagctcgttctcgacttatgcgaaaccgccggcctcgccctgacgccgtcgatcgccaaccacctttattgcgccatcgtttccgacacggggtcgttccagttttccaacaccaccgcccgggccttcgccgcctgccacaagttggtcctggccggagcccgcccgatcgaaacgagcgaagccctcttccataacaaccggccggaaaaaatcatcctcctgggccgggttctctcgactctccggctcaacgccgccggaacgatcgcccagatcgggatgttccggaaggatttgatcgagctcaacctccggcaggtcgacacggaagacatcaccaccctggcccgatcgatcatgggcgtccgggtcgtcctctttttcaaggaaatggagcccgacgtcttccgggtcagcatccggtccaagggcgaggcccacgcggccgggatcgccgaacacttcgggggcggcggccacgcccacgccgccggcttcacggtgtacggcccgtttccgatcatttcggccgaggtgatggcctcggtcgaaaatctcctggacgcccccgcctcctcgggctcccgctgaccgccggcatggacgggctcctcctcctccgcaaaccctccggccccacgtcccacgattgcgtcgttcgtctccggaaaattctcggggagaaaagaatcggccatttcggcacgctcgatccattcgccgagggacttcttttagccgggatcggaaaggcgacccgcctgttcccgtttttcggaacgatcggcaaaacctacgaaggcgtaatccgtctcggccaagcaaccgatacctacgaccggaccggaacggccctgggcccggcggtcgattccctgcccgcggaggaggacgtcctccgggccatggcccgctttcggggcgatctcattcagttggctccgccgttttcggccaagaagctggccggcaagcccctgtacgtctacgcccgcggcggcaccgaggtcgagcgccgcccggcggccgtccgcgtcgaccggtttgagcttcggtcgtacgccccgcctgacatcgatttcgaggtttcctgctcggccggaacctatgtccgttccctggcccacgacctgggcgcggacctgggctgcggcgcccatctccaccgcctcgtccggacggccatgggcaaatacaggctggatgaagccaaaaccccggaggaaatcgaggcggccgccgccgccggacgttttgaggcgtttttgattccgccggaaggccttctggaggaccttccggcggtttcggtgacggccgcggggcgggccttggtcaggaacggacgggcgatcggccttttcggatcggccgtcgccgtcccgcccgagccggctccggcccccggggccgtcctccgccttttcgacccggaaaaccgcctgatcgccctggcccggatcaaggaaaacgaggcggcgcctttcctcgtcttgatttaagccggacttttgttgtatcgtattctggaaatgagacttaacaagaaccagatcgatcatcttgccgggatgatcctgcgcaatttgctgaaagaaggcaaaattctggccgaaaacaaggaacgtgtcctcgaggagatcaccgttcaaatcaccgaggaattccagaaagaggaccgcctcgacgtggaagtccgggaaattctcacaaaacacatggaaaaaatccgccgggagaacttggaatatcaaaccatgttccggatgattaaaaccaagctggcccgggaacggaacatcgtcctatgagcagccgcctgtcccgggaaaaaatcaattatctgagcaccaggattctggaagttctctcgaaaaacgacacggtcgagtaccttgacgagccgaacgaggtgcgcttgtcgatcgtccgggcgatcgaggaggagatgcgcctctacgaccagctcgacaagaaagcgaccgacaagatccaatcccagaaaaagccgatcgaggaaggcagccgggagtgggagatcctctaccgcaagtactataacgaagagctgtcgaagctcggcaagctctccgaataagccgatccgtccgtcccctcggtcccctgtcccggggatgattccgtccccccgtctctcgatccttcccgccgacggcgatcgttctaagaccgccgaaacaagcgtcgctgaaaagccgggatggacgggatttcggccgcggtcgactcccggagaaagaccctaccgggccggcgaggggggggaagcgtccttgagataggcggccagggcgtcccgccagaaggaaaaaggagtcagcccggtttctttcatccgggcgttttcaagaacggaatacgccggccggcgggccttggcccccagggccgccgaatccacggaaacgatgatcgacggatcccggccggacagctcgaaaaccgcccgggcgaaatccgcccaggaacacgatccctcggcggtcatgtgataaaggccgtaggcgtcggtccggaggagctcggcgatccgcgcggccagctcggccgtcgtcgtcggagtgacgacctggtcgtcgacgacccggatttccttccgtccggactcggccgcctggagcatcgcggccacgaaatgccgtcccttttcccggcagccggccttcccgtaaagcccgcaggtccggatgacgaaggcccgccccgcgtacgcccggacgaaatgctctccggccagcttcgacgccgcgtacacgctgagcggcccgggagggtcctgttcgacgtacggcgtcctcttctccccgtcaaagacataatccgtgctgaaatggacgagaacggcgtccagctcccgggctgtccgggccaagtcccggacggcgatcgcgttgacggcgaaggccgcctcgggccggtcctcgcattcatccacccggtggaaggcggcggtgttgacgatggcgtcgggaccgatgagggaaagcttcccggccgtttcctccgcccgggtgacgtcgaactccggccaaaacaagggaacgacctcgtggcctttcaaggccgtcctcaggtcggtgcccaactgtccgtccgccccgatcagcgcgattttcatgatgaaaaaaaagccgccccgccgttcaggcggggcggctgggaaatctcacccgcgcggctcagaagatgtagcggaaaccgagcagaagcttgtagtgatcgtcgaccgggcgatcggaggtcaggacgggaatccgggcctcggcgaagatcgagccggccgatgtgtaatggttgaagatgttgacgccgaactggccgaccaggtcgatgccgctcttccgcgtttcctgctccttcgtcgtgtatcccaatcccgcgcccacgtaaacggacgggccgagatgcaggttggccgtgacgttgcccatgaagaagactttccaaggatcgccctgggaggggatggccgggcccatggtcaggacgatgtccatcagatcgggaaccacgccccagagcatgccgacgcggccgaagaagaatcccgtgtaggttccgcgggctaggaggccgccgatttcggccacccagaagaatctcttctgggtgacgtcgaaggtaaggtggcagggatcggccgtggaggaggcggcgcccatgtcgtcgaacacggagacgttgacgccgtatttgccggccttggtgaagaccttctgccaggtgaacggcttggcgttggccgtgtaagagtcgatgacgttgcccgtttcatcggtgatctcgaagaccgccttcaccagctggccgtcgggatcggtcgagccgttggcgtcgaaggtgatcggcttgccgacataatcctcgcaggggaggcaggacgtccagagcttgcaggtcggcggggcgttgatataggccgtgacttcgcagggattcgacgaggcgacgccgtcggcgttgacggccgcgcctttgaagacatacgagccggccttgtcgaaggaggtctgccacttgcagtcggccggggtcaggttccggtcggcgatcttgacgccctgggcgtcgaagatctcgaccgtcatcgaggccgcgttctgggtcccgcacatgtcgatgacgacgggctcgttgagattcgccttcatcgggttgaccacgagcaggcaggtcgccggcggagccggcggaatcacgtcgaccgctttgtacaaggccaggttgccgcagggacggggcatggcgtacgtgtacagcttggtcggggttttcacgtcaaaaaggaagacgtcgagaggttttttcccggcccattcaacatcggtccaaaccttaacctttccgcccaagcggaagaacatccaggcgaatttttccccggccggaagggaggcttcagtgaaaatcccgtccttcaaggcttggaggacgggctcgtaaagatcgccctgtccaacctgatccatgccgatcttgatgtcgccggcgtatttatcggccagcgttttcatgacctcggccgtcgggaccttgcccttgatccggacaaaggtattggagccggttcgccgccatttcttggtttcggcgtaagacgtgaccaggccgaaagcgaggagaacaatcaaaaagaccgtcagcttcttggatttcacgataaagccctccttccaaggacgatcaaagggattttttttgcgtacatggaacgtatttaattcttaacaccgggacggcctaatgtcaagagagtattttttcatgcttcacctgaaaaaacggggatttcttgccttcgcgcctcgttctggtttatgatgaccccctcgaggaggacgatgtgaaggacgtcaaagtggagtcggagctcgaagtcatcaccccgaacgagccgggaattctgggccgggttcttgggacgctggccaacgccggcgtcaatcttcgggcgatgtgcgtgacgtcccatcccgagggagggcggttccggctgctgacctcggacaataagaaagccgaggccgccttgcggactctgggctacaaggtgaaagcccaatcggttctgacggtcgtcatcagcgaccggatcggggccggggccgaggtcggcgccctcctgggcaacgccgtgatcgacattcacacggcctacgccacggccgcggggaaggacgcgattctgctcgtcctccaaaccaacgccaataaaaaggcctacgaaacgctgcgctgagcccgggtcggctctggatcaggccttttccgccgccgtccgccgcctttcttttcgcaacaaccggaccgtcaagaccaccactccggccgccaggacgaacaaggccgcgtcggccgcggccaggacataattcttcgtccgcagatactgacggaacaggatcgccagggaggcgatcgtcgtggccagcatgaagacggccgggatttccgtaaaccacgccctcctcctcctcagcatcagccaagccgagacggccagcaggctcatggccgccagaagctggttggccgttccaaagaccggccagaggagggtgaaggtgttcgaggccgccaggcaccacatgagaaggacggaaatcccggcgttgatccaatgtttccggagaaagcccggcaccttccggaaaaggatttcccaaagctcctcgaatagatagcggttcaggcggacggccgcgtcaagcgtcgtgacgacgaatccctcgaccagcaggattccgaagacggttcccaaggccgtgggaatccccaagccccggttgaagagatgtcccgcggccagggagaatccgagaatgggattggatttgatccccggctccgtcggccaaacgatcgagcgataatcgccgaagctcaagaacgccccgatcgccagaagaacgcagacggccaggagcgattccaggagcatgccgttgtacccgacgatccgggcgtgcgattccctcgaaagctgcttgctcgtcgtcccgccggcgaccagggcgtgaaatcctgaaatcgccccgcaggcgatcatgcagaacatcatcggccagatcgatcccaaggcccggacgccctcggccagattgaagccgggcatcgtcacccggacgccggccaagcccgtccggaccagggagacggccatcaaggcgatgccggcgtaaaggatctggacattgatgaaatcgcgcggctggaggatcagccagaccggcaggcccgcggcgaacaggacgtaaaccgagatgatgatcatccaggcggaggcggagacggttacgggaaaagcgatgcccaagaagacggacgtcacgccgattgccgcggccatcggataagcgacggtcatcttcacgcccttccggtgaatcaggaatcccagaagcggcgagcacagggtgatgacgataaccgacatcgaggcgatgcccccgatccggcccatcggcacgccgtccacgacgacggttctcaggaaggtctccccttcccggacgccgatcttttccaggggccagagcgaggtcagggagatcgaggtcgcgctcagaaacgacgacgtcacgaggacgatcatgatcaaagtgaaggcgatgaacaggtgaaagccccgctcgccgagcgttcggcgggcgatttcggccaccgaccggccgtcctcccgaagactgacgaacaaggtcgtgaaatcgtggaccgccccgatgaaaatcccgcccaggagaacccacagccaagccggaacgaaaccgtaaagaacggccatggtcgggccgaggatcgggccggcaccggcgatcgcggaaaaatgatgggcgaaaacgacggggactttcgtcgggacgaagtcgcggtcgtcccgcaaagcgacggccggggtcggccgggagggatcctcgcccaggcggcgggcgatgaagcgggaatagaagcggccggccagaacaaaggcggcggcggcggcgatcaggacggccaaaacgttcatgacggcctccaaaggcggttactataggactccgggaggaatttttcaaatccgttgacttccccccggcgtttggattaaaatgagcgccttgagattggtcttttcgaggaggaatcgatatggcgaaagctgaaccgaatgtcgtccccctgtgcgacgttctcctggtgctcctgatcatcttcatggtcatcactcccatggttcaaaagggcatcgacgtccgcttgcccgaagtggccagcgaaggctcgggcggccagccggccggcctgatcgtctgcaccctgaacaaggatctgacggtcaacatcaacaatgaaaattatcccggtcttcagaatgccggtgacgagctccgccgcctgtattccacccgttccgacaagacgatcttcctgcgggccgacgtcaagctgccgttcagcaaggtcgtcgacctgatcgacgtctgcaagggcgccggagtcgacacgctcggcctcgtgcccgagatgatcgacgaataatccctctctttgcgccgtccgcgatggacggctgaaaagaaaaaggacgctcccgcgagcgtcctttttctttatccccggatttttaaccgggcgggcggcggcccgccggccgggccttattccttgaccggcccgatcacctcgtgggcgatgaccatccgctgaatttcgttcgttccctcgtagatctgaaagagcttggcgtcccggagatacttctcgaccgggtaatccctcatgtagccgtatccgccgtggatctggatcgcctcgttggccgcggcgaacgccgtgtccgaggcgaaagtcttggccatcgccgattcagagccgttggggaggccccggtcggccagccaggcggcgtgatagaccagatggcgggcggcctggatttcgatggccatttgggcgatcttgaactggatggcctggtagagggcgatgggctttccgaactgccggcgggttttggcgtaggcaacggcggcttccatcgccgcccgggccacgccgacggaggccgccccgaccgaggcccgggtctggtcgaaggttttcatggcgatgatgaacccatggcgctcgcggccgaggatgttggccgccgggacgcggacgtcctcgaagaaaatctcggccgtgttggaggcccgctggcccatcttgtcctcgactttgccgaccgtgatccccggcgtgtcgcggggaacgaggaaggcggtgacgccccgggcgcccttggccggggcggtgttggcgaaaacggtatacaggctcgccacgccgccgtttgtgatgaagcatttcgcgccgttgagaacgtaaacgtcgccgtcccggacggcccgggtctggacggaaccggcgtccgaaccggcctcgcgctcggtcaggcagaacgcggccaagctcattttcctgcacagcggctccaggaatttcctcttttgctcctcggtcccgaagagaatgaggggggcggtggccagggaacaggccatcatgctggtgaaaaggccggcgcagccggcggccagctcctcggaaacgacggccaggtcgagattcgaaaggccgcctccgccgtaggcttcggggatgtttcccgtcaggaaaccggcctggaacgctttttccatgacatcataggcaaactcatggctttggtcgtatttggcggccaccggacgcagctctttttgggcgaactcccgggccatttcttggagggcttgctgctcctcggataaagtgaaatccatcatgaacatctcctttggggcgtctgccgtgatctttttctggcgtgaaaaatcgcttccttttataccggattcgtccgggactgtcaatttgccggacggggcggggccggctcagtcgacaagaaccgcgtcgcggacgaggacggaagccggattcgtcagcccgaagacggccgacaggacatcctgcgggcggggggctttggccggatcaaaacgaaacgtcatgaccaggcggttgcggtccggatccaggcggatctccgggccgccggccggaagcccggcggcctcgattttccgccggacgaattcggacgtcccgccgtccggtcccgggccggccaaaacgtccccgacggccagatgtcccaagtccacgctgtaaaccagcccgcgaaggcgccgggaaaggggcggcgcgtcccgctccagcggccggagccctcgaaaccgaagcccgtcgggagccgaggaattcaaggcgtccgcgcagacggccggggccaggaccgcccgcgttttgaattcgaggcgctcgtcccggccttccatccccagggccagcggaggcgggaaggccatccgcatcatgggatgaaatccctccgaataggccgccggaatcccggcccgccggaacgttctctggatgacattgaccaggtcgttgtgtccgatgaaccggagcctgccttccttaatatagacggcctcgtaccggacgacctcctctccccccccgtccgcccgctcaggcggcggggccgccggaggggtgaatcgcggcggagccggcggctttttgccgatcgccccgatgaaggcgcagccgcggcaggcgccgcaggacgcgtccaggcaggagggagtgggctcggcggccagggccttcaagaattcccgccggaagaattctttggccacgccggaagccatgtggtcccagggaagggcggcctcgggatccagggaggaaacatacgccgccggatcgactccctcctcctcgaacgcccgccgccacacgtcgaaccggaaccggtcgccccagctgtcgaaccgcgccccggcccgccaggcccgcagaagaacgccgccgagccgccggtctccgcgggaaaacacggcctccagcagcgaattctccaccgggtgcgtcttgaccttgacatttctccgcttgaagaggaggtctttcaggagccgctgcttctcctggagcgtttccgggccgtccatggccgcccactggaacggcgtatggggcttgggaatgaacgaggatacgctcaagttgatctgcggcgatccgcccgtcaactcccggcctaaaagggtcagccggccggccaacccggcgatcgcctccacgtcctcccgcgtttccgtcggcaggccgatcatcacgtagattttcaggagccgccagcctcggcggaacgcgttggccgcggcttccataagatcctgatcgctgacgtccttgttgatgacccggcgcaggcggtccgtcccggcctcggccaccagggtgaagcccgttttccggaccttcgtgatttcgccggcgatgccggccgaaaggccccgcggccggagggccgagagcgaaagcgaggcccgccgcggctccaattcggacatgagcgcccggacggtctcggaaagatagggataatcgctcaccgagagggcgaacagcgaggcgtcctcgtagccggttcggacgacaccgtccagggccgtttcgaccaccgactccgcttccctcagccggtagggggcgtacagcgaggtcgcctggcagaagcggcatttctggggacatccgcgggcgacctcgacggcgatccggtcgaagaccgattggacgtttggaacgacgatcccggagggaaagggcgcccggtcaaacgatgggaggacgcgtttctcaaccggaaacggcgcgtctccggacgccgggcggacgacgaggagcggcggagttccggccggccgggtctcgtacaaggacggaacgtaaacgcctcgaatcccggccagggcccggaggatcccggcccgccgctcgccccgggctttcaggcggatccacaaatcgatgatttccggaaacgcttcctccccgtcgccggcgagaaaggcgtcgaaaaacgcggccgccggctccggattgaagacggccggcccgccgccgacgaccagcggggcatcgtccggccggtcggccgccaaaagcgggatccggccgaggtcgagcatcgtcaggacattggaatagttcagttcatacaggagggagaatccgacgacgtcgaaggcatcgagcggcgtccggttttccagggaaaacagcggaatcccggacgcccggagcgcgtcctccatgtccggccacggggcgaagacacgctcggcccgaagatcgggccgggcgttgagaatatcgtaaaggattttctgccccgggtacgacatcccgatttcataaacatcgggaaaggccaaggcgacggcgacgctcgtccgggcgggatccttgcggatggagttccattccccgccggtgtagcggccgggtttttcgatccgggggaagaggcgctccgggtcaaacattcgcgaaccgccgcatcttgacgttgacgaccagccccagggcgaaatacgtcgacaggagcgacgaccctccgtagctgagaagcggaatgggaatcccggtgatcgggagccatcccacgatcatgaagacattgaccaggaattggaaggaaatcaaaccggcggctaaaaacgcgatgtaaatgccggcccggtcgcgggacagtccgacggaagagaacatccgggccagcatggcgaaataggcggccaagaccgcaaaaacgccggcaaagccgaaatcctcggccaagacggcgaagatgaaatccgtgtggcgggcgggaagaaaccggagccggctctgcgggccttttaaatatcccttcccggtcagcccgcccgagccgatggcgatctgggactggagcacgtgataaccggccccccgcgggtcctgggccggattgatcatcatctcgatccgctttttctggtaatccttgagaaagaaattccagccggccgccccgagcaccaccgccccgatgagcatcgcggccacggttttcttcgtgagcccggccaggaccagggcgccgaaaagaatcggcaggaaacacatggccgttccgaaatccggctgcaggagaatcagccccatggggactccgaccaatcccgcgctcagggcgatcacgcctcgcgaggcgtagggcgcccggtattccgagaagacccgggccagcatcaacaagacggcgactttggccagctccgacggctgccctcccatgaaggcgatccggatccagctgcgggagccggagaccgtccgcccgaaaaggaacaggccggccatgaagaggagaaacaaggcatagatataaggagcaaaggccatccaggccttgtaatcgatggagatcgtcagaaagaagacgatcaatccggcggccatccaaagaagctgcttccaggcgtatccgccgccgctgtcggccgaggcgctgtagatcagaaggatcccggcgagagtgttcgcgaccatcaaggccgtgagcacccagtcaatttccttgagttgaacgcggtcgatcatggtttgatttataaagagaaaacaatttcccggcgatcggcgcggccgtcgcccctcccccgcccccgtattcgacgagaacggtgacgacaagccggggctgagcgcgcggcgcgaacccggtgaaccaagagtgcgttttcgcggctttggccccggttccgatgcgttcggccgtctcccggctgatcgtttgggtcgagccggtctttccgcaggcggcgaagccctcgacgcgggctccttggcccgttccgccctcgttgaccgaccgccacatcccctcgatcacctgttcgaaaacctccggccggacgttcaaagcggaatcccccggcggctcctccgaagcgccgagaacgagatgaggccgaatgccccgcccccggttggccagccgggcggtcaagacggccatctgcagcggcgtcacctggagcggcccttgaccgatcgccacggaaatggtctctccgggataccactcctcgttgcgcgtggtttttttccaccgggtcgagggcaccagcccttccttttcgccggggatgtcgacgccggttttcctccccagccccatcatctcggcataccgggcgatggtatcgatcgggatccggcgcccgagctgatagaagaagacgttgcaagaataccggatcgcgtcgcgcagggaaagggcgccgtgaccggcctcattccagcagcggcggagggctccgtagatctcgatgcccccgccgcaataaaacgtcgtctccaggccgatggttcgggaatcgagagccgcgatccccatgaccggcttgaacaacgacccgggcgaatactgcccttgcaaggcgcggttgagaaggggattgtcgggattgttgacgaacgactgccattcctccggcgtgaaacgggtgatgaatttgttcggatcgaacgtcgggaagctggccagagccaggatctctccgttcgagggatccaggacgacgatcgccccctcccggccggccaggagctcctcggccttggcttggagatcgtaatcgatcgtcagggccagcttctttccaggcacggggtcgacgcgctccagctcgctttgcttgcggccgaggctgtcgacgacgtcgatgacccgtccctcccggccggcgatgcgacggtcatatccttgttcgattcccatttttccgaccatgtcgccgggccgcagctctcgggcccgttccttcaggtcgttggcgtcggcttcctgcaggtacccgaggacatgggagcagaacgactgtcgcgggtataatcgtctcggctcggtctcgacgatcaattccggcaggtcgtttttccgcgcctcgatccgggccacttcttcgaacgtcaatcggtccttgacgacgatgggccggaaggccggccaagacttgtatttttcgatgcgggaggcgacgacggagggatccaattccaggagggacgcgacgcgggcgatggaggccgcctcgtcccgggtgttctcccggatgaaggaagccttgaaagccgcccggttgtcggccaggatgatgtccccggtccggtcggtcagaatcgcccggggcgccggcaggatgatttcccgggtccgattggccacggccagggattcgtactttttataatcgagaatctggattttccagtagacggccagggtcaggccgcacaagacggcgacgatcacgaaaatgcgccgggcccggcggcggaccagggagaaatcctcgtaaatgcccttatcgctcacggcgggctttccatcggcggattccgaggttgatcatcgcggccgccgaggccgataccgccgggcgcaggaggaggagccccccggaccacgggaggggactccggccgatcagggccgaaagcccggcccagccggcgaacgtcccggcggccaggacggcgaaaaaggcgaacatccggaaaaacggctggatgttgattttgcgggagacgtatccggccaggaaaccgccgagcgtcaggctcaaaccggcgaggccgaagacgccgagggaaaacgcgtcgacgatcaagccgcaggcggcgccgaaaacagcccccggcgcctcgcccttgtgcgtcccgaagacgaggacggccacggagaacacgtccacgaccaggtcggcggaggcggacaaaggccggagcagggaaaaggcgagaaaggcggccgccgccgcgagcgcgccgtcgatccagtttctcattcccttccccccgacggcccggtcaagacagcgacgatctccaggtcgcggaaatcgaaggccggctggacggcgattttcttgaaaagcgatccgtccgtcccgatggagacgatcgttccggccggaagtcccggcggaaaaacgcggtcgaacccggtcgtcgccagggcttcgttttcgaccaaggattcgtcggaggccggaacataaatcatccaagcccggccggaggccgggtccccgctcaagatccccgagacggggtgctccaggccgcggacgctgaccgcgctgaggttgtcggtgatgagctggacggtcgcttcgccggaatcgatcggggcgatgatccgtccgaccagacgtccccgggcgtcgacgaccggcatctggagccgcactccatggcgtgtcccccggttgatgacgatcgatttgaagggctggagggcatcgacgccgatgacgtcggccaggacgaacgcccggtccagccggttgagaaacgcgtccgcggcctcccggtcctccagccgttcgaggctgtttcggaggagggcgttctcctgccggagccggaacaattcgtcccggtacctccggtttttttcctccacgcggcgcaggtaaagataccgtcccaagaaatccccgccgccccggagcgcgctccgaatcccgtgctggatcggggcgaagacggcgaacgcggcccgctcgatatagctggcctcctcgccgagggggatctggaaggaaagcaggaccgcttgagcgaacatcaggcccgccagcacaagtccgtttttgcgctccttcagaaatcgcggcatggccgggccgccgttttacggaatggcgatcttgcggagcaggtcgatatcgtccagcatctttcccgctcccaggacgacggccgtcagcggatcgtcggtgatgaacacgggcagctgcgtctcttcccggatgcgcttgtccaggttcttgagaagagctccgccgccggtcaggatgaccccgcggtcgatgatgtcggccgacaactccggaggcgttttttccagggcgatccgaacggcgttgatgatcgcccccacgacctcctcgagggcttcgcggatctcctggtcatcgatgacgatcgtcttcgggatgccctcgcggaggtcgcggcccttgatctccatggtcaggggctggtcgagggggtaggccgatccgatttggatcttgacttgctcggccgaccgctccccgatcaggaggttgtatttcttcttgagatactgaaggatcgcctcgtccatctcgttgccggcgatccggatcgaatgattaaagacgatgccgtccatggaaatgacggcgatatccgtggtcccgccgccgatgtcgacgaccatgttccccgtcggctcggaaatcggcagctcggccccgacggcggccgacatcggctgctcgacaaggaagacctcggtcgccttggcccgcatggccacgtccttgaccgcccggcgctcgacttgggtgatcccggtgggaatgccgatcacgatgcgcggccggaggaggaatccgcggttgttggtcgcttccttgatgaagaagtccagcatcttctcggcgatctcgaagtcggcgatcaccccgtctcgcatcggccggatggccaggatgttggccggggttttcccgagcatctccttggcccgctggccgacggcctcgaccttgccggtctgcttgttgagaacaacgatggacggttcctggatgatgatccccttgcccttcatgtagacgagggtgttggccgttcccaagtcgatggctaagtcgcagaaaagcctgttcttgaaccagcgataaagactcatgccgaactcttccttgcgtgaatcctaattcttttgagagacgctatttaaacacaattcgtcgcggggcgcaatggaacgcggatccgccgccggcggacgcccggaaacgggaggaagaggtccgcccttgactgaaaacatgattcccgatataaatggggcttccgttccaaggaggccgcatgagccatcaaccgttcgttccagaaaaaaccgatatgaaggaattcaccctccgggcccttttgatcgggctcgtgatgaccgtcgtcctgggagcggccaatgcctacctcggcctgcgggccggaatgacgatcgccgccacctaccccgcggccgtcatcggcatggccgtcctgcgcctgatgaagggttccattcttgaggagaacttcgcccggaccgtcggttccatcggagaatcggtcgccgccggggccattttcacgattccggctttcttgatcgccggcgtgtggctgaagttcgacaccttcgacgcttatattaaaacgaccgcgctgctcttcgtcggcggccttctcggaatcctgttcgtcactttcctccgccgggtcatggtcaccgatcccgagctcggctttcccgagtccgtggccgcggccgagatccacaaggccggccagcacggcagcagcagcgccaagcacctcttccgggcgatgggcgccgggtccttcttctatgctctcgacatgttcggcatctacgccgccagcaaggatttcctcttcaagatcggcaagatcggccagagcttcgttcgtctcggaacggaggaagcctcgaccaaggtgaccgccggcggcatggtctccgtctcgggcccgggcattttcccggcctacctcggcgtaggctatatcatcggcccgcggctggcctccctcaacttcgccggcggcctcctggcctggggcctgttcgccccggtgctcatgttcttcctcggcccccagctgatcgacatgatctacggggccggggccgtcgttcccgccgaggattggggcggcttggtcaccaacgtatggaagttcatcatccggcccatcgccgtcggagggatgctcgtcggggccggctacacgctcttcaagatgcggaagaacctgtccgccggcgtcaaacggtcgttctccgacgtcaagaaggcgaccggccagactcacgtcgtctcccgtctcgaaaaagacctcaacatcaagatcgtcctgggcggcctggccctgacgttcatctgcatgattctcgtctaccgcgttttcgccggggcgtttttcccggccctgatcgccgcggtcgtcatgggcgtggccggcttcttcttcgccgccgtctcggggaacctcgtcgggacgatcggctcctccaacaatcccatctccggcctgactctttcgaccttgatcatcgccgccctcctcatggtcgtcgtcggggcggccggggccagcggcgtggccgccgtcctgggcgtggccgcggtcgtttgcgtgtcctcggccgtggccggcgaaatgctccaggacctcaaggtcgggcacatcctcggcggaacgccatggaaaatggaggtcggaaacgtcatcggaatcttcttggccgcggccgttatgtattttccgatgatgctgctccacggcgcctacacgttcggcagccgcgagctggccgccccccaagcgggcttgatggccgccctggccaaggggatcgtcggcggagaaatggcctggcccctggtcatcgccggaatgctgatgggcttcgccatgattcttctccaagtcaaatctccgatgctggtttccgtcggcatgtacctcccgctggaaacgaccttcgccatcttcgtcggcggcatgatcaagggactggccgacaaggccgtggccaagcgccggctcaatcccgcccagaaggcccgggcggagaacgtcggcatcctgatcgccgccgggctgatcgccggcgagggattgaccggcttgttcaaggccctctggaaaatcctgttccttcagaacgccattaagttcgacgtgccgcgcctcttcagcgccccgtcctactggctcggcctcttggccatcgcggccatggcctggtacctgatctacgtgccgatccggaacgccggaaaggccgatgagcccccgccgccgtcggcggttatgtaaagcaaggaaaaagggggacggaaccttgttccgtccccctttttttttcctctcgagaagccgcccggcggccgccggcaagccgccgcgccggcgctctttttttcaccccctggaaagcaacggaaaattccgttaaaatgttttgcggaaacggcccatgtccctgagacccatcatcaccatcgggcataaaaccctggccgcgaagtccgctccggtcacggtcatcgacgacggcgtccggacactggcccgggacatgatcgaaaccctccatgccgccccgggtctcggcctctccgccccccaggtcaacgtctccgtccgcctgatcgtcctcgatctttccatcggtgaaaatcccgacgatctcatcatcatgatcaacccggaaatcacctcccaggaaggccaaatcatccgggaggaaggatgcctgtccgtccccgaagtcttcgaaaaagtgacccggccgcagaaagtcacggtccaggggctcgaccttgaaggaaaggaaagggttttggaggcccgggatcttctcgcccgggtgttctgccacgaaatcgatcacctggacggcaagctgttcgttgaccgcctctcccccctgaagcgcagcttgatccggaagaaattcagaaaagcggcggccgcgaagccctgaacgcccccatgcgcgtcgtctttttcggaagtcccgaggcggccgtcccctcgttccaggccctcctcgaagccggccacgaaatccctctcgtcatcgcccaacccgaccgccccgtcggacgaggcaggcgccttcttcccggtccggtcaagcggttcgccctcgaccgcgggatccccgtcgcccagccggaaaaaatccgtttggatccggagatcctcgaccggcttcgggccgcggctcccgatatccaagtcgtcgtcgcctacggccagatcatccccatgacgatcgtggcccttccgccgcgggggacggtcaatgtccatttctccctcctgccccgcttccggggagccgccccggtcgcggccgcgatcgcggccggagagacacggacgggcgtgacgatcttcagcttgaacgagaaaatggacgagggcgacatcctggccgaggaggaaactccgatcggttcctcggaaacggccggagagctcgaagcccgcctggcctcgctcggggccggacttcttctccgaacgctcgaccgcatcgatgaaatcatcccccgttcccaggatcattcgctggcgacgctcgcgcctaagatccgcaaggaggacggccggatcgaatggacgcggagcgccgtcgaaatcgaccggcgcgtccgggccttaagcccgaaaccggcggccttcgtccggctgcggggaagccggttgatcatcctcgccggccggcccgtcgaaggcgtcgccacgcccgcccatcagggcccgccggggacggtgacaagcctgtccaaggaggggattacggtcgcttgcggcggggggacgcgttatctgatcacccgcctccatccggaaagccgggcggaaatggacgcccatgccttcgtcttggggggagggattcaagcgggggatttgctcgaatagcggtcagaattcgtccaagatatacaaattgggattgaccgcgctgccgttaaggcggacctcgtaatggacgtggtcgcccagcgcccggcccgtccgtccgacgaggccgatcgtatcgcctctcttgacccgggcgcccggcttgataagcgctttgctcaagtgcccgtagagcgtcgtgattccgttgccgtggttgatgatgatattgttccccagggcgccgtcgtaggcgacccggagaacggcgccgtcggccgtggcgaccaccggatttccatgaaccgtggcgatgtcgaggccggaatggaaggcacgccggcccgagccgaacggatcgaggcgccagccgaaaccgctggagcggtagccgatgaccggggcgatggagggccgggtggcgaactggccctggagctgctcgaaatgggaaagcagggcgtcaaggtttttctcaaggtcatcggccgtccgcgtcagatcctggacggaggcgatcgacggcggcggatttccgggaggagggatcacttgagccgcatccggcggaaaggcggattgcccgccgccgacgccgggattcgtcaacatttccggcgacttgatcccggcgaagacattcagcttgccggcgtattcccggaagccgttcagcttccgctccagctccccgaccttcgtcccataaacgcgcagctcttccttctgcttcgcgttttcggcgaccagggagtggtagctccggcgggaaaggcggacgcggacgtaatcgaccgtgacggccgtcatcaaaacggccagaccgatgccgcaaaccgtcgcagccttgaccgtcctccgcgaaaacgaccatgtccggggagacttggtggtatgcggaatgacgatcagggagagatgcttctttcccatgggaattctttaaaccgccctcctgaataacacaagcccgaaagggatgtcaaggcataatttttcggccggggtcaaccgcacaggaccgctccgccgttgacgttgatgatcgccccggtgatatgccgggccaggtcggaggccaggaagaggatcgggccggcgatatcctcggccggcgggatgcgtttcagggggatcgactggcggatgctctcccggaaggccgggtcggcgaacgaaccggcgctcatgtccgtgtccacccagcccggggcgacgcaattgacccggatgccgaagggagccagctccgaggaccaggacttggtcagggcgttcaaggctcccttggtcgcggcgtaatgggaatgatgggcctcgccccggattccggccgtcgatccgacgttgatgatgcatcccttgctgcgggccttcatctgcgggacgacggcgtccgtcaggtaataaacgccgtccaggttgacctccatcgtcgtcttccaggcctcgacgtttccctcgcccatttccaggtaagtccagatgccgtgattgttgacgaggatgtcgacgcctccccaggcgtcggcgaccgccccggccagggccgcggcgtcttcccggcgggccaggtcggctttccggaccaggcagagccggcctcgggattcgacggcttccttgacctcggccgccgctttttcgtcgcggacataattgaacgcgacgtcgctgccggcctcggcgaacaggatcgccgccgcccggccgatgccgcgggagccgcccgtgatcagggtgcgttgtccgttcagggtaatcacggcgctcacctgtccccggcgtagccgagggtaaaatccttggtcccggcgaaatccagcggggcgtacaattcctcggccgccggcaacactttcgccttcattgtctcgaaatattcggccgggctcggaagggcgcccttgagggcggcgaccgccgccagctcggctgagcccagatagacccgggccccgtcgcccatccggtcgtcgaaattgcgggtcgaggtggacaggatcgtcgccttgggggccacccgggcttggttgcccatgcacagcgaacaccccggaatctccgtccgggcccccacctgggaatagatcgcgtagtacccttccattttcagccgggtctcgtccattttcgtcggcggcgtcagccagatcttggccggcgggcagccggccttgtcgaagatccgtccggccgcccggaaatggccgatgttcgtcatgcaggagccgatgaagacctcgtcgatcttgtcgccggcgaccttcgagaggagcttgacgtcgtcgggatcgttgggacaagccaggagaggctcggggatatcggccaagtcaatctcgaggacggccgcgtacgctccgccgtcgacggccttctcatcccgctcgatcagcgccggctcggccagccaggcctcgaccgcggcgatccgccgccggagggtttcggcgtgtccgtagccttgttcgatcatcttggtcatcagggcgatgttgctccgcaggttccgggccacttggtcccgggacaaggcgatgaccgccccggccgccgaccgttcggccgaggcgtccgtcagctcataagcctggtcgacggtcagatccggcagcccttccatctccaggatccggccgttgaagacgttgacctttcctttcttggcgacggtgagcagcccccgccggatggcgaagtacggaatggcgttgaccgcgtcccgcagcgtcaagccgggattgagcttccccttgaagcggaccaggacggactcgggcatgtcaaggggcatgaagccgagggctccggcgaacgccacgagccccgaaccggccggaaagctcaagccgatcgggaagcgggtgtgggaatcgccgcccgttcccatcgtgtccggcagcagaagacggttgagccaggaatggatcacgccgtcgcccggccgcagcgaaacgcctttccgctcggtgatgaagccgggcaggaaccggtgcatcttgacgtcggccggcttcggataagccgccgtgtggcagaacgactgcatgaaaaggtcggtttggaattccaggcaggcgagctccttcagctcgtcggcggtcatggggccggtcgtgtcctgggagccgacggtcgtcattttcggctcgcacgccgaacccgggagcatgccgtccacgccgcaagcccggccgacgatcttctgggcttgagagaacggctgtccctttttcgcctcgggattgcggaccgggataaagaacggcgcctcggggaggcgaagggccgcccgcgctttctgggtcaaggcccggccgatgatcaagttaagacggccgcccgcccggaactcgtccttgatcgtcgctggcttgagctcgaaggtcgagagaagggcgccggcggccgacatgatcgtccccttttcaagatcgaggacgatcgactcgccggtgttcatccttgtgacgtcgacgttctggatcggcaggccgccggaatcctcggtggtgttgaagaagatcggggcgatcaagcctccgaggacgacgccgccgcggcgcttgttgggaacgaagggaatgtcctccccgatatgccacatgaccgagttgcaggcggacttgcgcgacgagcccgtgccgacgacgtcgccgacgaaggccacccgcttgttttcagcccggaatcgggcgatggcggccgcgccgtccggaaaccgcgtcccgcccatggccagggcgtggagcgggatgtccggtctcgtggcggcctgcttggccggggaaaaatcgtcggtgttgatttccccgtccaccttgtagaccgtcagggtcagggacttggggaaggcggggcggcggagaaaccattcgccttcggcccaggatttcaagacgccggcggccgccggattcgtcgcggccagggcggcgactcgatcgaacgccgcgtaaacgagaatcgtccccttcaaggcttcggccgcggtttgggccagggcgggaactccgagaaattcgacgagcggaccgacattgtagccgccgatcatcgtccccaggagaaaaacggcttgttcgggcggaacgacgggcgaggtcttccggccgcgggcgacgtcggccagccaggccgccttgactccggccgagggatcgacgcccggcgaaacgcggtcccggagaagggagagaagccggtcggcctcgccggccggcggggcttcgagcagacggcagacttcggccgtatcctccggattcagcggcaggggcggaatgcccagggcccggcgttcatcggcgtgcttgaaataatgatccaacatcgcggcggctccttgcggacgtaatgaatcgatccgctccgaaggcggattcggattcttctagtttactcgaggaacgggggcggcggtcaagtcattgaaatgttcccaatgatcggcggcgcttttcttttcgttccggcggtcgctccgaagcctgggccgggagaggtctcgccgggaccctccgtccgtctcaaacgccgcgttctgttggtcggcggcctttcctccgggcggacggccgtcctctttcctttcatcaagctcttttcccggcgttctccatgatcaagcgaacgccgcccttcgttctagatccgaacggtttcccgagagagggagccggtcccggattcggcggctcaatgccggatgcgggctctttggacgttctggtagccggagagacggggacgcttttcgagatagttgatcagggcgtcggccgtggtgatcccgagcgacttgccgggatcgcggtgggcgaaatcataagcgctggggatgtagctggaaaaaccgaccttgtatgtccggtcttcttggaggggccggccgtcctggccgatgagctggacgtcctgaacgcgccgctcggcgtcgatgcgcaccgtgtagacgagacccgaaacctggaggtcgatgccctcccccttttcgaacgagatccggatcaggttgcggatctcgtcggtcgtcatgatcatgaccacgacctggttttcgaaaggatcaagggcgtagacgtctttgaccgtgattttccggctcaggcggcggagccggatgccgccgttgttttggaaggcgatgtccaggccgagctcgcggcgccaggcgtcggtcatcaggctgcccaaggcctccttgcccgtgatgtcgaagggggccgaggcgaggactcgggccaaggccggattctcgttgaattcctcgatcaggcgcttgatttcgcggtcctctttcttttcccggtcgaggtcgatcaggcagccttttttctccgccacccgcccgtcccgaaggaccaggtccacccggcccaggaaccggttgtcgctccccgcttgggcgaccagcacgccgttaacggtcgcggccggatccaccctggtatgggagtgtccgccgatgatggcgtccaggccgggcatttgcccggccagcttccggtcctggcccaggccgaggtgggtcagcccgatgaacagcggggcgtctccgcgcagatcctttaattccgaggccttgaggaacggttcctcgaaccgcaggcccgcaacccgttcgggcaaggtcgagggaaggccgttcccggcttcaatctgaatcaggccgaagaggacgatcttcgtccctttccggccggtgagaacgaccgaggaccgcaggtgcggcaagacgcccgaatcgtcgcgggcattggcgcaaacgaccgggaagcgggcccgggcggtgaagctctccaggacatccagcccgtaatcgaactcgtggtttcccaggcagagggcgtcgagtccgaggcggttgtagatttccaggacgggctcgcccttcggctcgaaccggtcgacgaccggattgccggtgaagttgtccccggcgcacaggtagaacacctcggccccgcttgcccgctccttcttcaggatcgcggccactttggcgaaattttcgattttgccgtggacgtcgttggagtggaaaatgacgatccgtgtttccccggaaggtggaatctccgccgcggccggggagccgcttccggacgccaggattccggccaggaccagcccggccgccggaacgaggcggatcatcctcttcatcaggatctctccccggcgccggaggaacgaacgaagatctcgtcgccctcggaaagcgcgccgtccagggcgatttcgttcccccaggcgtcgaaaacgaaggcccgttttccccggacgttccgccaagcctcccgggaatggcgccggattgcgtccccgacactggccccggcgaagagctcgatcgtccggccgttcaccttgatgatcatgagcgcgcaccttctttcgttcttttgaaatttcagtttaaccgatgaccggggtcggcggcaacctgaagccggagaagcggttgtgtttttcggcgaatcggggtaaactcccccatcccgatttcactatcgcggccgatgaagcagacacggatgcgattccgggctgaaacccgggaatcaaaatatcaggaaggagagacgttatgcgcaagaagatcgccctgatcggcggcggccagatcggacaaatcctggcgatgatcgccgctcagaaggaactcggagacatcgtcatcctcgatattcccgagtttgaaaatccggccaagggcaaagctctcgacctcatggaaatggcccctcacggcaactacgatgcttttatcacgggaacgtccgactacaaggacatcgccggagccgatgtcgtcatcgtcaccgccggccggccccgccaggcgggcatgacccgggaggatcttctggccgtcaacctgaagatcatctccaccgtggccgccggggtgaaacagtacgccccgaacgccttctgcatcatcatcaccaatccgctcgacgcgatggtttattccttctacaaactgaccggattcccgcgcaaccggatcgccggaatggccgggactctggacaccgcccggtggcgggccttcatcgccatggagctcggcgtgtcggtggccgacgtggccggaacggttctcggcggacacggcccggacatggttcccctgccccgcttgaccacggtcggcggcgttcccttgaccgaaatcgcgaccaaggaacagatcgaccggctggccctccggacccgggaagccgggacggaaatcgtcaagctcttcggcaagggctcggctttcttcagcccggcttggagcgcgatcgtcatggccgaatcttatctccgcgacaagcgccgtattctcccctgcgccgccctgtgccagggcgaatacggggtcaacgggcttttcatcggagtgccggcgatgatcagcgccaacggcgtcgaaaagatctacgaaatcaagctgaccgaggacgaaaacgccctccttcagaaaacgatcgccggcgtgaaaaaaaccaccgaggaaaccaagctctaggcgttcggtccccgaatcggttcggccgccccgccttctttccggcggggcggctttttttcggcctcctccgccggccgcggttgacacccgcgccggcctccattaccattcctctatgtttaaaaggctcaatccgctcgtttgcctcgtggtttcagggttgttaatcttcggcctttcggcgtcctgccgcaaaaaaggggtggattccggctccccccgggtgatcctcatcggggtggacggcgcgagctggaatttcatgaatcccctgatcaaacggggaaaactcccgaatttcgaacggttgatgaaagaaggaagctcgggcgtcctgagaacgatcaacccgacgaaatcctcggtcatctggacatccatcgccaccgggaaaaccatggtcaagcacgggatcgtcgattggacctatatcaaggacaacgacatcacggttccctactcccaatcagcccgccgggtgaaggcgttctggaacatcctcggcgagctcggcctgaacgtcggggtggtcaactggttcgtcacgtttcccccggaggaagtcaacggctacatggtctccccggccttcgccaccggcgccgacgatcccttagccccgggcgcggccataacctatccgcccgaactgctcggcgaactcgatttcgtccacggggaaaactacgaatccctccggacgaaggaaagcatcccggatctcggggcgggcgcccccaagggcagcctggccgcccacttttacaagtacctcctggccgaccgggccgtcgaatcggccagtctctatctgtataaaaaacacccggtgaacgtcttcgccacttatttccgcatcttggacgtcaccagccatttcgccgtgtcgcacgtcgaccccgagctcctggccaaggcgaacgaggagtccaaaaaggacggcgtctccaaggccacccggggtcaagtcgatttggccttcagccgcgtcctggagccggtctacgcctacatggaccgggtcgtcgggcggatcctcgggctggccgatgaccggacgacggtcatcgtcgtctcggatcacgggttcatgctgggcaaggacggcatgggctacaaccacttcaagatgcccaccctcccccacggggtcgtcttcctcaagggacccgccttcaaggcgggctacaagattgagaaggcccacatctacgacattctgcccacgctcctgtacctcctgggacagccggcggccgaggacatggacggcaagatcatgaccgaggctttcaaggacgagttcttgaaaacgcattcggtgaaaacggtcaaaacctatgaaggcggagcggcccgaaagatcgctccggacaataaagagatcgagaagaaaatgctcgaggacttgaggacgctgggctacatcaagtgaggccgccggccctccgcttttttcgatccggcgtcgaggcgatgatcccgggatgagactgatcgagcaccggtccaaggccctcttgtcccgatacggcattcccctccccaacggcgagcttgtcgaaacatccgcccgggcggcggccgcggccgaacgcctcggcggccgcgtcgtcctgaaagcccaggttccggccggcggccgcggtcaagccggcggcgtcacgttcgccctcggcccggaggacgcccgggccaaggccgaatccctgttcaagacgcccctcgtcaccgctcagaccgggggaaaaggcttgccggtccggacgattctcgtcgaggaagccgcggctctccgctcggagttttacctcggcgccgcggtcgaccggtccgaaggccggattcttcttctcgcctccaccgagggcggcgccgacctcgaggaaaccgcccggacgaagcccggggccgtcgtccgggagacggtcgatccgttcgccggcctgcggcctttccaagcccggcgcctcgccttcgccctcggcctttccggcgaaacgaggactcaagccgaggcgatcatggacggtctcgtccgagccttcctccaaaacgacgcgactctcgctgaaatcaatcctctgggcttgacggaggatgaccgcttcctggccctggacgcgaagatcgttctcgacgacaacgccctgttccgccatcccgagcttcgtccggcggccgaggatccggacgccgatccggccgaagcggcggccgcccggtccggcctgagctacgtccgcctcggcggagacatcggctgcctggtcaacggggcgggcctggccatggccaccgccgacctgatccaagccgccggcggccggccggccgactttctcgacatcggcggaggagtctccgaggacgcggtcaagacgggatttgaaatcgttctctccgacgccggcctccgggccgttttagtcaacgtcttcgggggcatcgtccgctgcgacgtcatcgcccgcggccttctccgggcggccggggaaaaaggcgtccgcgtcccgttcgtcgtccgcttccagggaacaaacgccgaggagggccggaatctgctggccgcctcgggcttggaatacgagagcgccgaaacgatgggcgaagccgccgcccgggccgtcgccgccgcccggcggacgggggaaggccgggcatgagcatcctggtcggccgcgattcccgggtcattgtccaaggattcaccggaaaggaaggctcgtttcacgctcagcggatgatcgaatacggaacgcgcctcgtcggcggcgtctccccgggcaagggcggccgccggcatctcggccggccggtgttcgacacggtccgccaagcccgagcggcctccggagcggacgtctcggttctattcgttccgccgttcgcggccgccgatgcgatcatggaggcggccgaggccggcatcagcctgatcgtggccgtcaccgagggcatccccgtcctggacgtcctccgtgtccgggcatttctccgccggacttcttctcttctcatcggcccgaacacgcccggcgtgatcactcccggccgggccaaggtcgggatcatgccggggtcgattcaccgtcccgggcggatcgggatcctctcccgctccgggactctgacctacgaggcggtccggcagatctccgacgttgggctggggcagtcgacggccgtcggcatcggcggcgacgcggtcaccggactgagcttcgtcgacgggctgaagctctttcgggccgatccggaaaccgacgcggtcgtcctgatcggcgagatcggcggcacggccgaggaggacgccgcccgcctcatccgcgatcaatacccaaagccggtcttcgcctatatcgccggcttgacctccccgccggagcgccggatgggacacgccggggcgatcatcgagggtcgcgccgggcgggccggagacaaggcccgggctctgtccgaggccggggcgatcgtcattcccctgccctcggagatcggggcgacggtcgccgcccggttatagtccggaccggctcatcctctttacatcggccgggcggcgaggcaaactggggaaaaggaaggaccgtcatgacccgattcatcttaaccgccgttgttctgagctcgaccgtttttctcggggggcagacgcccccggcggatccgtcgcccaaaccggccgcgacccggccggggccgatgaccgtcggccgagtatccggaggtctttatctcgtgaagggcggggccggagcgaacgccgcgttttacgtcggggaggagtccgtgatcgtcgtcgacgccaagatgacggaagaggcggttcgcggcatgctcgcggagatcgcccgggtgacggaccggccggtgaaatttctcattctcactcacagcgacggggaccacgtcaacggcctgccgggatttccgggaggcctgacaatcatttccagcgccgcgacaaaagcggaaatggccgcggcctttcaagaagaacgatccgccggccgccgggccttccttcccgccgaaacttatgaagcccgactcgagctgattttccgcgtgcccggaggaaaaaccgccgcggtcaccctcctcgagctcggcccggctcacacgggcggcgacaccatcgtcgtctttcaggaggaaaaggccgccttcatcggggacctggcctttgtcggccgcgacccgctcatccaccggtccaagggaggaaccgcggccggctacgtcgccgccttgaaaaaaatgatcgagctcgacggggtggagacttacctctcgggccacgccgacccgttggccaaggccgatctcagggcccttctttccgacctggaggaaataatcgcccgggtcaaggcgctcgccgccggggggaaatccctcgaggaagtgaaggccgctcttcttccccctcccctgccggacgcccccccgtcccgctggccgtccttcgtcgaaaacgcctatctcgagctgaccgagaaaaaatagctcggtcgagtcatttcccgggcgccgggagcgtttcttccatcttgaggacgacgtctttttccatcccggcccggagcagcctgaaccggacttcatccccccagccgaaaccggccaggaggatccgcatctcatcgatgtcggtgaatttgcgcccgtccaccgacaaaacgacgtcgcctttttcaaaatcccggccccgggccgccccgtcgatcggggttctctcgatcaccgggttgtccaagccggcgaactttttgaaggccagcccgatggaaggatacgcccggcgctcctccgcctcgaggccgacgatgtaatcggccagcgtccgggagaccgtcagcgatgatttgccccggggaatttccacggccacgacggttttccccggaaggccgctcatctccacggtccgccggttgagaccgagattgaaaaggagatggccggagccgacgaggacgacgaccttccgttccccgccgccgcgggccttgaccgcgttggcggccatgaccgaatcccaggccgcctgcccccggtataagccctcgaacatcatctccatcccggcccccttcatggcctcgggcatttcttccgacgaaaatatcgtccgcatcagcctccggtgatcctcgttggccaggtcgggcttcgggacgatcgccttctcttcatccgaaagcgcatcccaaccggcccgccggatccgagtgatgatctcgcgcggggcgttgagggcgtaaagagggaggcggcgttcctttatcaaggcgaagatcggccggtaataggcgaagttctggttccaggtcgtgtaccaacggccttcccgcaggaaggcgtcctcgtcgaggaggccggcgctccaccgcgaaagcggctcctggaaagcgaccggatacatctccaagccgacggccaaggcgggatcgcggtcgctcagggcccggaggattcgggcttggagctcatgcatgggcagggaatcgtgagtttctcccaggaagacgaagggaacggcccgcatctcctcgatcatcgtctcgaaagataccggggctcccgtttccagggaaacgatctccccggctttcacttcgacggtcaggtccttgaaccggggatcaccgatatggagaagaaaggaaggatcgatctcctgtccgaacagcggggccgccaagagaatcgccgtcaccctcgccagccgcggcagtatgcttttcatcatggccgtctccctccgtctttcggggaaccgcggtcatgatagcccgggagaccggcccggtcaattccgcggccagcctcaaaattcagccggccgccacggtcgttattcttcttccgttttgatccggccttccttgaccgcctcggcgatgattttctgctggaggtgggccggcacttcctccatgtgggaatattccatgaggaaggagccccggccgccggtgatcgacgtcagcgtcggctcgaaatctagcatttcggacatgggaaccgtggccttgagaatccgcatctggcccttctgctccattccgctgacccggccgcggcgtccgttgaggttgcccatgatgtcgcccatgtaggcttcgggcgtgtaaacctcgacgttcatcaccggctcgagaatcgtcggcttagcctgctgcatggccagcttgaaggccttggaggcggcgattttaaaggcgatatccgaggaatcgacctcgtggtaggagccgtcatagaggatgaccttgaaatccacgaccgggaatccggccaggacgccctttttcttggcctcgatcaggcctttctcgaccgaggggatgaaattgcgggggatcgctccgccgaagatcttgtcctcgaactcgaagtccttgccccgcggcagcggctccatcttgatccagacgtcgccgaactggccgcgccctccggtctgcttcttgtgccggccctggacatccgcccggcctttgatcgtctctttataagagaccttgggcggcttgaggtcgatatcgacgttatagcgttttttcagcttatcggtgacgatccggacgtgcagttcgccgcctccggagatcaggagctggttggtgtcgggatcgcgctcgaagcggatggtcggatcctcctcgaccaggcgctgggacgcctgggagatgcggtcttcgtcggcccgggtcttgggctcgatggcgaacgagatcgccggctcggcgaaggtgatcggcgggatcatgaggccgctccccttggcggccagggtgtcgccggtcatcgtcgctttcagcttggccgtggccaggatgtcgccggcgacggccgctccggccggcgcctgctcctttccctgaaggaagaagaatccggagaatttttcatcggtttccttgcccgggttgacggccgctccgtcggaaggcatcttcccggagaagacgcgcatcatcgagatccggcccgtgtacgggtcggagatggttttgaagacgagggcggcgaacggctcgtccggggagggtttcagcgtcccggggcggccgttgatcgtcacctcgatctccggccggtcgaggggcgaggggaaaagcccggcgacccggtcgcagaacggctgaacgccgatattggccccgccggcggccgcgaacacggggaaaatctgccgggcggggattccggctttcaatccggcgaggatctcctcgggcgacagctcgcccttgtccaggtaggtctccatcagtttttcgtcgccttcggcgatcatttcgacgagctcgcggaaccgcttgtcggcctcgtccttgatctcggccggaacgggggcctcggtgaacttgccgctttcgtccttctcgaaaacataggctttcatcgacagaagatcgacgacgccctggaaatttttctcctcgcccaggggaatctggatggggatggcctggcggccgaagaactgccggatggattcgagggccgggccgaaatgggcgttctcccggtccatcttgttgacgatcaaaacccgggggagcttgtattcctcgagcatatcccagactttttccgtgccgacctcgaccccggccacggcgtcgaccaggacgacggccgcgtccacggcccgaaggcaggcccgcgtgtcccagagaaagttggaatatccgggcgtgtcgacgacgttgatcttggcctcgccgtgctcgacgacgcagagagccgagctgatcgagattttccgctcgatttcctcgggctcgaagtcggtgatcgtgtttcccttgtcgaccttggtcagccggttggtgaccccggcgttgaaaagcatggccgcggccagcgaggtcttgccggccgctccatggccggtgagggcgagattgcggattttgtcgggcgtgtacgctttcatgcctgttccttttcgggctcgttccgaagggaccgggcccgcgattcgatttccggatggaaagagtaaggggtaatatacacgaaaaccgtcgtttggaacaagccggttgacaagccgcgccgtggaaaacgataatggccgttgacatgaagatccggcgcgccgcaaaggggatttcgacgattttggtttttgccgccggctcggcccttgtcttgtgggccgcggcccgcccgaatccttcctccggggagaccgctcctccgccggcggacctgtcggggtacgcccttccgttgaaaagcaccccgtcgaaaatcgactcgccgctccggcggctgatccaaaccgaaaccgcggccgtccggacggtcgtcgaaatccgcgacgacggccggaggctcccctctccggacgatacccgcttcttcgtccgccggatcgaagagctgggcgggacggtggaacggacctcgggacggctgatccaagctctcctgccgccggagtcgatcgccttcctggccatgtctcccgggatttcccggctccgtcttccctccctcccccaacccgcggccgtcctgtccgaaggcgtcgcccgcagcggcgcctattcgtggttcgacctcccgtcttaccggtcgacggcgaatcccgtcaaaatcgccgttctcgacttgggattctccggatacgccgccctcatcggcggcgagctgccggccgggatcatcgtccgctccttccgggccgacgaggacccggaagccgggctcgttcacggcaccgcctgcgccgagatcgtccatgatatggccccggacgccctcctgtacctggtcaatttccaaaccgacgtcgagctgggcgccgccgtcgattacctcatcgccgagaacgtcgacgtcatctcgtgttccctggtctggccgggagccggggcgggcgacggcaccgggccgatctgcgagatcgtgaaacgatgcgcggcccgggggatcctctgggtcaacgcggccggagacgacgccttgagccactggcaggcggatttcaccgacgccaacaacgattccttccaggatttcgcctccggcgacgaaatccttcagtgggcggtcgcggccggcggggaaacgcgggccgttttgacctgggacgattggggggaatggaacgggtcgtcctacgacgctccgacccgggacttcgacctcctgctctggcgctggaccggcgcggcgtgggagctgctcgaattctgcgacgactggcagacgggcgaggccggccaaaagcccctcgaacagacctcgttgtggaaaaccggcaaagcgacatactacgggatttcgatcctgaaatggaacgccgccggcgctccccgcctccggctcatcgtccagggcaacgccgaggccgttgaatacgccgttcccggcgggagcctgggcattccggccgacgcgcccggggcggtcgctgtcggagcgaccgactttgaaaccgatgtccttcaagcctggagttcccggggaccgacggccgacggccggatcaagcccgacttgaccgccttctcccgggtctcgaccgctgtcctgggcccgcgggctttttccggtacttcggccgccgctcctcacgtcgccggcgccttgggtctcctgatggccaagacgccgttcgctcccggccagctccggacgatcctggaggagcgggccaaggatctcggcgagatcgggccggacaatcttttcggccgcggccgcttgaacctttacaagaaaaccggatcctgatcctggacggacgccccgctaaaaggtaaaatatttccgttatgccgctgtatgagtttcaatgcaagaagtgccggaaacggtttgaagccctcgtccgcctcggccgggaagccgaggtggtctgcgcttcctgcgggagctccgacgtccggaagctcgtctccggcttcgggatcggcggcggatcgagccggctgaaggaatcctccggctgttcctcctgcaagggaggcacctgcagcacttgccattgaaatgagaatcgtccggatcggcgtcgacaccggcgggaccttcaccgacttcgtcatcagcagaaacggacgcctgtcgacgaaaaagctcccctcgacgccggacgatccctcccgggccatcctggagggtctgcgggaatacctcgaggccgggccgggcctcgtcctcatccacggaacgacggtggccaccaacgcccttctcgagcggaaaggctccaagatcgctctcgtcacgacgaagggattcgaggacatcctctcgatcggccgccaaacccgccgccttctttacagcttgaaaggcgagccgcggattcccctcgtccaacgggacttgtgcttcgggatcgccgagcggacgaccgccgacggaaccgtcgaacggacccccccgccgtccgccgtccgaaccctcgcccggacgctcgtccgccgaggcgtcgaggccgcggccgtctccttcatcaacgcttacgccgacgggacaaacgaggaggcggtcgccgccgagctcgagcggcgcggccttctcgtttgcgtctcctcgcgcctgcttccggaataccgcgaatacgagcgcacgtcgacgaccgcggtcaacgccttcctgatgcccgtcctggaccggtacctggaatcgctggaaggagggttggacaaggcctccttgtttatcatgcagtccaacgagggctacatctccccccggaaagcccggaaggagcccatccggaccgctctctccggcccggccgggggcgtcgtcggctcgctcgagctggcccgggccgccggatttcccgaattcatcagcttcgacatgggcggcacgtcgaccgatgtctccctggtcgacggggatatccgccggacgaacgaaaacacggtcggggatttcccgatccgccttccgataatcgacattcattcggtcggggcaggcggcggctcgatcgcccatatcgattccggcgggtcgctgcgcgtcggcccccgaagcgccggcgccgaccccggcccggcttgttacggccggggcgaggaccctacggtcaccgacgccgatctcgtcctgggacgcatcgatcccgattatttcctcggcggccggatagtcatcgagccggagcgaagccgggcggcgatcggacgcctggccgtccggatccggaaaacgacgctcgagacggcccaggggatcgtcgacatcgccaacgccaacatggagaaagcgatccgggtgatcagcctcgagcgcggcttcgatccccgcgaattcgcccttctctccttcggcggggcgggcggcatgcacgcggccgatttagccgcctccctccggatgaaagccgttctcgccccccaaaacgccggcgttctctccgcattcggacttctcctggccgattccatcaaggattactcccgctcggtcctcaagaccgtcgagaaagccgacccggccgtcctcgagcgcggcttccaggagatggagaagcggggccggcgcgacctggccgaggacgggttcgcgcttcaagccatgttcttcgagcggtcggtcgatctccggtatctcgggcagtcctacgaaatcaacgttcccttccctccgggcggcttcaagtccctggccgaggagtttcaccgcctccacgaaaaaacctacgcctaccgtcacgcccggggtgtcgtggaaatcgtgactctccgggtgaaagcccggggggcggccggcaagatccgtctgcgtaaaatcccgccccgtccgggggcttcggccggagacgccgcgcggaaaatccaagccattcattaccgcggccgggcgcacaagggcccggtttacgaccggtcgcggctttcgccgggactccggtttgacggacccgccctggtcgtggacgagggatcgacgacgtttctcccgccgggcttcgccctgcgggtggacggctatcacaatctgatcatccggaaaaaagaatgagaaaatccggcgacgcgatcgagcttgaaatcttccggaacctcttcatctcgatcgccgaggagatgggcgcggttttgggacggaccggcctctcccccaacatcaaggagcggaaggattattcctgcgcggtcttcaaccggcggggggagaccctggcgcaaggctcgcacatcccggtccacttgggagccatgccgctttcggtccaagccgccctcggcgctttgacgttcgaggacggcgacctcgtcctggtcaatgatccctaccggggcggcactcatctgccggacatcacggccatctccccggtgttcgttcgcggtcgtccggcctttttcacggccaaccgggcccatcattccgacgtcggcggcatgtcccccggcagcatgcccctggccacggagattttccaggaaggcctgatcctcccgcccttgaagctcgtttcccgcggccgattgaacgaggacgtcctcaacctcatcctggccaacgtccgcacgccggaggaacggcggggggacctgttggcccagatcgccgcctgcgagaagggacgaggccgtgtcctcgaggcggtcgagaaattcggcttggaccaggtcgagcgatatgccggactaatccaggactataccgaaaccttccttcgaaaaacactccggacgatctccccaggaacgtacgcctgcgccgacttcctggacaacgacggaatcacggaagagccggtccggatttccgtccggatcacggtccgcggcggacgagccaaaatcgattttcgcggttcctccccccaagtcaagggcggggtgaacgccaacgcggccgtcacgatttcggccgtcctctacgtcttccggtcgctcatcgaggaggacattccggtcaacaccgggcttctccgtcccttggagatcgtcgctccgccggggcttatcatcagcgcccgttttccggcggccacggccgcagggaacgtcgaaacctcccagcggatcgtcgacgtccttctcggcgccctggccaaggccatgcccggccgcattcccgcggccagccaggggacgatgaacaacatcgctctcggcgggatcgatcccgtccggggacggagcttcgcctactacgagaccctcggaggggggatgggagcgagccgcgagcggcccgggctttcaggggttcatacccacatgacgaattctttaaacacccctctcgaatccctggaaaaatatctccccctgagaatccgcgcctattccctccgtcccggttccggaggcgcgggcgccaaccgcgggggagacgggctcgtccgcgaatacgaattcggcgttcccacccgggtgacgatcatgtccgagcgccgggttttccctccctacggtctcgccggcggcgggcccggacggcgggggcggaatattctcatttccaagggtcgccggaccgttctcggctcgaaaagcgacgtgacggtccaagccggcgatgtcatccgcattgaaacgcccgggggaggcggctacggcccgccggcccggaaaaaggaatcccgatgaaaaaacgcctcctcctggttgcggccgcggtcctggtttcggccgccgccgccccggccgaattctatttcggcgcggcggggatctactccgcccccctggatcagccgtattcctcccggttcggcgccggaatctcggccggatgggtctggagtccccggttcgccgtcgagctcggcctcggctggcggccctcgcgcgtgaccggctcgctcgaggggctcagcgacggaaccctgcgcgtctttccgctcgaggcctccctgcgggcccgcctgcccttgggctccggatgggtcctgggtggagaagcgggagcgggttgggcctttcattcattctcgctgagcgacaacctccgggccgcttgggaggcgctcggaatctccatcaaggaatcagccgacggcggcccggtcgtccatctcgggatcgggattgaatacctcctgacgccccgctggtccttggaggccggccttcggtacacgcggagccggaccaaggggacatggtcgatcaccgacgaggccggcggtctcgtccaatccggaacgctggagaagctgaagctcgacgccgtctcgctgacgttcggcctcaagatcgcccttttcggggccggagaatctcaataacgacggcgccggaggaaaatcctccgtccgccgccggggagcgtccctcatgacccgtattcttcgctcggccggcgcgattctcgccctgctcgttttcccgccttggatctctcccccgtcggcgttcccggccgccgccccggaaaacgatttcatccgcggcgtctggcttcatcccggccaattcgggccggacgaaaccgcggctgcaaccgcgatgggcgcggtcttcgaggcctacgtccgagccgggatcgactccgtcttcatcatggtgaagtccccctccggccatgtctatttccggagctcggccggcgttcccgatcccgcctacgcttatgactttttcgggcttttcctccgcgaggcgcggcgccggaacttgaccgtccacccctggttctgcgtcttccccgagagcgccggaatcggcgaagccgggcgccggccggagtggctcgtccagggactgaacggcgagaccgccggctcggtcaatccggcgatcccggaagcccgggcttatgagcggggactgatgctggagcttctccgcaactaccccgaggcggactggatccatctcgattacattcgctatccctgcgagccgaccgagccgttctacggtttcgacaagcgaagccgggacctgttcaaagccgaaaccggggccgatcccctcgaactgaaggccaaggacaccgggaacatgatgtgggccgaatggctgcgctggaacagccgccgggtgacgcttttcatccaggagctccggcgggagacgcaaaccctcggccgaacggtccggatctcggcggccgtctttccggacgccgccgcttccaaagtcctcatcgggcaggactgggcggaatgggcccgctcgggcctggtcgacatgctttgcccgatgctttacaccaacgaggtggagttgttcgaaacttacgcccgggaggccgtcgccctccggacggaggggtgccgagtctgtctcgggatcgggatcggaacgtcgcacaaccggaacacccccgaaggcatggccggacagatcgagatcggccggaaggccggagccgacggggtcgtctttttttccgggaacagcctcggcgagccgtttttaaaacggctggaagccgacagggccggaagggaatgacggcccgaggccggccgtgtcccgaagggattgctccagagaataggccggagcccaccccatctcgcggcggattttatcggtcgcgtaggcccggtcgacattgaccgtccccaggggcctcaagccggggttgaggcccagggcggtgagcgcgcggatcaacccgtccgtcgcccggaggatgctcccggggacgactttcaccggccgcatcaagcccatggcttttaaaagcacccgggtgaactccggcatgtcgacatcgtacccgttgacgatataacgctcgccgtctcggccggccgaaagcgccgagacggcggcccgggcgacgtcgcgcacatccacgaagctgttccgggcggggatcatcgggaccgcgggaagatacttcaatccgcggagaacagcgtcgagccgccgcgaaccgggaccgatgaaaaccgagggattgaggatgatccgccggatccggccggccgcccgctcgagctcgagctctcccaggcgcttgctgtatccgtagggatcgatccgccgctttcgctccagatcgggaatcaggctctcgtcagccggagcgggaggcaccggccggccgacggccgcgatcgagctgatgtagatgaaattccggcagccggcggcggccgccgcctcgagcaggcggcgcgtccccaggacattggaccggtacaggtccggggcggccgacggcttgaaggaaaccaaggcggcggcgtgaatgaccgaggcggccccctccaagccggcggcataagtctccggccggttgagatcgccccggatcattcggacgcccggcagcccctcgaggccggaaggcgtcgggcggggcgtgcggacaagaagccggatcccgccgtccggattcagatcggagacggccttgacgatgtgccggccgagatggccgaagccgccggtgatgaacgtcgcggtcacggcgcccctttgggaagcttcgcccggcgccgggtttcggccggttcggtcatgaaaggcccggctggagctcagcgggaataaaattcgcggatcttgtcgacgacataatcctgctcgtccgtcctcagctcggcatagatgggtaaagccaggacttccttcgacgctttttccgcgaccggaagatcgcccggacggtagccgagcgaggcgaagcatttctggagatggagcggcagcgggtagaacacggccgttccgactccgttttctcgaagaaagtcccgcagaccgtcccggtcggccgcccggatcacgtactggtggaacgtgtggtaatccgccgctccggaaaattcatggacggccgccggcgggacgacggccccctcggcctgaagccccgtctcggcaaacttgcggttgtaggccgcggccagggcccgccgcttcttctgccattccggaagatggcggagcttgacccggagaacggcggcttggagggcgtcgagacggaaattacctccgacttcgtcgtaaaaatagcgttccgtttcgccgtgggtgcggagcttgcgcagccggcggccgaggccgggatcgttcgtgagaaccattccgccgtccccgaaaccgcccaggttcttggtcgggtagaacgagagcgtgccggcttgtccacaagcgccggccttccggacgccggacccggagggataatcggccccgatggcctgggccgcgtcctcgacgacggccaggccttcgtcccggccgagggccaggaacgcatccatgtcggcgcattggccgtagaggtgaaccggcaaaaccgccttgacccggacgccgggctcccttttccggaacgcggccaaggcgtcccgggcccggagggggtcgaggttgaacgtcaccgggtcgatgtcggcgaacaccggccgggcgccgagacgggcgatcgtcccggccgtcgcgaaaaacgtgaacggcgtcgtgagcaccgcgtcgccggacccgacctccagggccattagggcgacgaggatggcgtccgtgccggaggagacgccgacggcgcgggccgttccgctgagggcggccacctctttttccagagcctcgacctcgggaccgaggacgaattgctgggaagcgatgacctcaagcaccttggcttcgatttccggcttgaggccggcgtactgggccttgagattgagaagggagacattcatgacaggaccttcttcaatttggatttttcgatgagcagctgcccctggtaactgacgtaattcaaaagaatcatcacccggtcccggtccgaaaggctctttttaaaaacaccgcgcaggcccttccacggtccgtcggcgacctcgatctcgtcgccaggggacggctcgaccccgtatttctccagctcgatcaagccgctgatctcccgggattggagctcctcgatgaagcgatcctccaggggcacggccccggcgtcgttgccgacgacgcggcggacgccccgggtgtatttcaccagcttgaattgttcagggtattcgaagcggagaaagacgtaacaggggaaaaacggcttgattcgcccgctcgacttgaagcgcgggcaatagaacggaaagcccgcttcctgaaaaaggcgctcgacttggaactccttctggggtttcgtgcagagaacgaaccagctgaccatgcgcgctcgtttccgtccggaagcgtcctcttccctttcagagcctgatcgcggcggccaagtcgacgggcgtcttgggtatggctttccccaggatccgccggccggccgcggtcacgaggacgtcgtcctcgacccggattccgccgaaccgccgccaggattccagcttgccgtaggcaatgaaatcggcgtgttttttttcggcctgccataaatcgatcaaggcggagatgaaataaacgccgggctcgacggtgacgacgaagccgggcctgacgggcttggccaggcggaggcttttaaggccgaattgcccgctccgcttggtcgcctcgtcgtagccgacgaaatcctcgcccaggttttccatgtcatgggcatcgaggcccaattggtggccgacgccatgggggaaaaagagggcgtgggcgccctcgcggacggcggcctcgacatcgcccttcatcaatccgagctccttcaggccggaggcgatggtcagggccgccgtttcgtggacgtccttgaaggatcggcccggacggacggcggccacggcgttttcgttggccgcccggacgatctcgtaaacatcaagttgccgcgaggtgaagtttccaccgacggggatcgtccgggtgatgtcggaggcgtaataacacggcgacgaggctccggcgtcgacgacaagcaaatcgccttttttcaaccggtggatgtgggaatggttatgaaggatctgcccgtcccgggaaagaatgatcgggaaggcgaggccccggccgccggccgcggcgatcccttccatccggccggcgatgtccatctcccggacgccgggctgggccatccgcatggctgcgtcgtacattcggcgggtcgtgaaaagggccgcttcgatttcggccacctccgcttcgcttttaacctcgcgctgggcgacgaccgcccggatgaaatcgatcgagacggcggccgaaacccgggcgggcttgaggcccaagagggattcgagcttttggagatgctcggcccggtacgacggaagaaaatggattttccgtttcttccgggccgcttcctggaggacgccggccagggcggccgccggccgtgtcaaccttacgccgaccgaggccgcccggtctttcattttcggcaggtcgcccatccagatgacggcgttgatgtcgatgtcgtcgccgaagaggatctccttttgtccgtcgacgtccaggacggcggccaagccgggcgtgtccaggccgaaataataaaggaaggtcgagtcctggcggaaggggtaggcgttgtcggcgaaattcatcgggctttcctcgttgccgaggaagagagccaaaccggatcccaggcgttttctcaggaggcggcgtctttgcgtgtaggtcttcgcgtcgaacatggaggactccttcatccgggcggttccgctagcgttttcgaatttcaaatgtatcagaccgccggggcggatgtcaaaaaacggccgggggagcgtcgtcccggtgcctccggaacacgtcgtcgaatttgtccgctgatttccggaacgcctggaggacctcggggtcgaactgggccggggaacaatccggccctccttccaggatggtccggacggccgtatcgtggtccaagccgcttttatacgaccgctcgctccgcagggcgtcgtaataatcacagagagcgacgattctcgcctcgggcgggatttcctcccctttcaggccggccgggtatcccgatccatcccaccgctcatgatgggcgagggcgacggccgccgcctcccggatgcgcggatgctcggaggcggccaggatcccgtagccgatccgggcgtgcgtccgcatgatctctttttcgtcgtccgtgagaaggccccttttcaacaggatatcgtcggggataccgattttcccgatatcatggatggagctggtgaaggcgatcgcctcgacatagtccagcggccggcccagggcctcggcgatgatccgggaatagagggcgacccgggcgacgtggtttccggtgcccgcgtcgcgcgattcgaccgcccgggcaagccggacgatcagctcgttgctcatccgtccgaccatcgacaaggcttccgccagctctcgcgttctccgccaaaccgccgcctccagcgttccctcgtaggatttctcgatctccaggagtccgctgattttttcgttgatcccgttacgggtgaacaggccgatcaatccttttttcccgccgcggcggccgaggtccccgccgccggcgaaatggccggccaagctggcgtacttgacgtcgagctggcgggcggcggcggcgagcttcaggagatacgcggccagaaagacataagccgtcatgaaataaaaaagcgccggccccagccaaaggtgaaaccgggcgaacagaagatacgaggcggccgtgattccggccaaaccggccgcccagatccaggccgccgtccgctccggcgtccggatgaaaagcgccaagcccaaaagggcggtcaagaacgctcccagccatgcggcggggaggggaaaatcgcggatttccgtcccgtccaggagattgttcagggcgttggcttggatctccacgcccggcatttcctgccgcgtcccgctgaacggcgtggccgagcggtcctggaggcccgcggccgtcgccccgacgagaacgatcttccccttgaaaaacgattccgggacgccgcccgacaagacatcggccaaggagatccggagaaacgtgcccggggggccgtaataattgatccgggaatgatcggtctggaagaggcggccggccgcgccgtccggccgaaaatccggcagggggttgcgccccgcccaggggcgcccgccgcggaacatcccgtaaacggccgcgctgaaggaaggaaccggacctccagggcgggatatggtgtgaaacagagaacgggagatctggtcgatcccgcgctcgatatggacgtggccgacctgcgtcccggccagcggaccggccgggagaaccaggttcagcgcctcgtcgaaataacaagccaggaccacccggccgttccttcggacggcctccgccaaccgctcgtcgccggccgacggctcggccaggatcaaatcgaagccgaccacggccgcttcatccagcttgtccagaaggcgggcgtacacgtcccgatccaggggccagcgccccaggacgcccaggctccgggcgtcgatccccacgagaacgatcgcctccgacgtcggccggctgctccgaacgcggaagaacgcgtcatgcgcccggatgtcccaactgtcgaaaacgcccagataatccgctccgaagaaaagaagaagaccggcgatgaccgggatgagccggcgtcgagaaagaaacgggatcgatccgaacggcgggagccgggacctccggtgcgtcgccatgggattttctagatcaggaggaccagcagaagggcgatcgccggaatcaggcagaggaaccggaacacgcctcccttgagaacgcggaatgtccggacagccgaaaacggactttccacgcccgagggagcgacggccgcgacccgggcgcgatagaggccggcctcgtccggcatgaggaaggcgatttccggatcgggagaaaggcgttcctcgaccagtccgagaaaacgatcgtcccgggccaactggaaccggtagacgatgcccgggcccctgtttgtgcaggtgaagaagacccggcgcccgtcgatatcgggctcggacaggaggggcgcgtccggaagggcgatgatctggaaacggcggggcgcggtaaaggcactctcccgcccttgaccgtaaacggcgctcgcccggagccggtagaatccgggggaaagcgccggagtgcggaacacggccgcggccaggtcggtccggtcgacgacgaggcggttgaaatcctcatcctcggcgatttggagatggtaccggcccgtccggggcggctccggccaaacgacgtcgatgaacgtcgcggtgaacatggcgccctccacgggggacgatggttcggggggcaagggaatcccgacgcgcacgggcaccggcgccgatcccggcccttccagtccgtcggcgtcgatggattgggcgatgagataataggtcccctcgtgcaggaggccgtcgaacaccgcggcttcttccggacggacggccgcctgaaggatgatttcgcgcccctccacgtcccgggcgagaaagacgcggtaaccggcggcctcctcgaccttggagaaccggaagcggagcggaggaaattgctcttcggccggaatatcaagaacggcgggaggcggcgggagctttcgaggcttttggggggcttggtccttgtggacgatcgtcccctccccttccccgacgatttccaggacggcttgggcttcgacgccgatttggccctggagcgtttcggcccgcgtcgtctccgtttcgtccaggccgacgcggaagaccgtcccccgggctgcggccacggccgagggcgtcttgacttcgaagcgggacgaccgtccggtcacgtccttgatccgggcgacggcttttccggctccgaggagtatccgctgaaagatgttcaaatcgtcgatctttttcgtcaccaggacggtcaaacgggcctccggcatcagttggagggtattgccgccggcgaaggaaatgaaaagcccgccgtccccgcccgttttcagttcatcgccggaatgaacgacgtcgccgggacggaggggcgtccattccttgtcttttttcgctcttcggacggcctcgccgacagcgatggtcaccgtcccttcatcctcgaatccgccgatgtattcgagggggatgtcgattttctgtccgggaaagatgaggttcgggttcgccaggcggttgagaacggcgattttcggccaaaccgcccgttcgaccaggtaggcccggcagatgttgttgagcgtgtctcccttgaccacggtgatggcgaccagaccggcgtcctgggccgcgaggacggccgttccaaagaaccacaaggccgccgcgggcaggcggatcgttttcatgatcgggcgccctcctcttcgcggggaaaaagacaaaataccggcttccccgatctgcataaccttgttttaatcatagcgcctgcgggaaaacgagtcaatatcaagccggaagtatgtcatatcaatattgaaattggactgggccattcaggccggaaagcggcaagtcaacggaaaaccgctccctttgccagggactgagagggccccggacgctttgggtgatcagggcctgatcccggaaggccggccgggatgttccggccgcgggtattcaggcggctcgagaagaaacgcggttttcggctccggccgcccgcgagacgagcttatcgatccgagccgagccgagcctctggaaagaacggaagacgccggaagagacagccggagttcctccccaaaaccgaaaagcgggggcttgatgatcccgaaagaaagaggccgcggcctcgtatatcttcaagggaaaaaatggacggttggtagcgggggttggatttgaaccaacgacctccgggttatgagcccgacgagctaccaggctgctctaccccgcagacatcggcattataacaaagattcattttttgtcaaaatgattttccgtccgccccgcggccggggcgatcgcttcgtccgaatcctaaacggtcgggaaaaaaacgcttttcagccaatcgccgaccgcccgggccaagccggcccgggattttcggaacgcatggtcgtcctggaaggcggcgatcgaagcgcttttcgccttgcgttccttcagggcccggtagaggggcagcgcgttgcgctcgaccttgttcgtttcgtcgtcccaagcgcagacaagcaggatgtccttgccggccagggccggggcgattcggaggaaatcgagattcgggtccaaggccgccgggcctatgtccgcccattcccgcggaacggcgccctcggcgaacctcaccgggccggccggggcggccatggccgcgtatgtctcgtcgacgattttcctcatctcgggattccgggcgtattcccggaggaattccccgtgatccgtgccggcgatggagaaaacgacgcccacctccgggcggccggcggcataagccaggaccatcccgccgccgtagtcgtagccgcccaagcccaggcgccgggcatcgatcttgaaccggaggatgttgtcgggacggtttacgaaataaaaggccgcctcgatgtccttcaaggtgtcggcgaagctccattccccttggctctcgaacgtcccgctgtagttgaaggtcaggacgttgatcccgtttttaaccaaggcggcgcccaggccaagaacatccgattcgtttcccggcaggccgtgaaggagaatgactgtgggaaagggcccgtctccctcgcagacgcggaggcggcccgaaagaagaacgccgccgcggtccaggacgatgttgaaaaccgtcgcggcctgaaggaccgcggcggataagagcagcgtgaaaaaggcgaatcccacagccgcgatccggccttttcttttcatcaagcgcatgtcgtgtttcctctctccggcgatgatcgaccccacccgggggaattccatccggcccggacgacccggcgccgccggatccggcccggcccggccgccggagcctgttcggccgcatcccgcgttcctcccggcgcgatgatgccgcgaggtcgggatacgccttcgtcgcgatcccgccgggccgggccgcgaggatcatcatcgatcctcctccttgtcgggcttcagccgcatctcggaagggcggcgactccactgtaccccggcccggccgttccgtcaaacggtcgcatcgcgcggtctgaaatccagccccgcccgcccgcgggcgctcgagaggcggcgagtactcctcagttgctgatgaaaggaaatggttgaccaggttccgatatcaaggaaaacggatatcgggaaatggagaaccaggttcggaatggattcggaagaagcggagggattgggtcttgtatcccgccggttttgttttataattacgcccgccatggccgcagatattgtgttttggattctggccgtcgtcagcgcgggagccgccgcggcgatgatcatttcccgcaacccgggacacaacgccctttttctcgtcctgtgcttctccgccttgggcggcatcttcggcctgctcgacgcccccttcgccgcggccgtccagattctcgtctacgccggggcgatcatggttcttttcattttcgtcgtaatgatggtcgatccgcggacgccggctccccccgagcggcggaaacgggcgaaaatcctgggcccggccatcggcctcgtccttctttttgaattgggaacggccgcctgggggatcctggcgaattccaaccggagtccggcctccggtccgggcgtcgcgcccgcggacgtcggccgccgtcttttcacggaattcgcctatccgttcgaaatcacgtccgttttgatcctggccgctttggtcggggccgttgtgctggggaaaaaagaggagccggagtcttgagcccggcggccgtcgtcggcttgagcctcgttctgttcgtcctcggggtcatcgcctttttcgtcaagcgcgacctcctgacccagttcatggccgtcgaaatcatgctgaacgccgccaacctcgcgtttctcggcttggcccgggggtcggcccggatcgacgcccaggtcatcgtctttttcgtcatgaccgtggccgcggccgaggcggccgtcggcctggccatcatccttcacctttaccgccgccggaaatccatccggacggacgaactcgacaagctgaggggttgaaggatgccggccttcgttttcattcctctcgccccggccgtcggcgccctggtcctctttccgctcggccggcggctgtcccgccggtcggtctcgacgctggcctgcgggtcggtcgccgcgtcgttcgttctgtccgtcgccgcggccctttccggttccggagtccgcatccaccggcttttcacctggatccaagccggcggcttccgggccgaagcggctttccgcttcgatcccttggccgccgtgatggttctggtcgtcaccggcgtcggcctgctcatccacgtctattcggccggctacatgtcccgggagcgcgacttcgggcggtatttcgcctgtttgaacctcttcatgtccgccatgctccttctcgtcctggccgacaacctggtcttgatgttcgtcggctgggagggggtcggcctctgttcatatctcctgatcggctactggttcgaaaaaccggccgcggccgacgccggcaagaaagcctttctcgtcaaccggatcggggacgccggcttccttctgggaatcctcgtcctttggtcggcggccggaacggtgtcgttcgccggcctttccgaagcggtcgcctccggagcgctcgccccttcggcggccgcggcggccgccgttctcctgttcatcggggcgacgggaaaatccgcccagatccccctctatgtctggctgcccgacgccatggaaggcccgacgccggtcagcgccctgatccacgccgcgaccatggtcacggccggggtgtacatggtcgcccggttgaacccgctttacgcggcctcttcctcggcgtccgggatcgtcatgcttgtcggggccttgaccgccgtctacgccggagtcctcgcccttgtccaaaacgacatcaagcgggtcctggcttattccacgatctcccagctgggatacatgtttctcggctgcggcgcgggggcttacgccgccggcattttccacctgttcacccacgcctttttcaagagccttcttttcctggccgccggaagcgtcatccacgccctgtccggcgagcaggatctgcggaaaatgggcgggcttcgaaaactcctgccccggacctatcccgcctttctcgtcggcgccctggcgatctccggcatcccctttctttccggatttttctccaaggatgccatcctcctcaccgccttcgccggcggacacgtcttcgccggaatcctcggcctggccggcgccgggctgacggcattttacatgttccggctggtctttctcgcttttttcgggagcaggcgcttctcggccgaggtcgaatcccgcctccacgaatccccggccgtcatgacccggcctctcctcatcctagccttttgttcgatcgtcgccggctatgtcggcctcccggccttgttcggcgaacgagcgaacctgtttttccggtttctcgccccagtcgccggaacaccggcctccgggcacgcgggaccgggggccgaggccgcgctgctggccgcctcgaccatctcggccctcgccggcttgttcctcgcgtatcttttctacgtccggaatccggccctccccggccgggtttcagcccgctttcccggcttccaccatcttctcctccggggcttcggcgtcgacgcgctttacgagacggccctcctcaatcccctcctccgcgggtcgaaggcggtttaccgccggttcgacctgggggtcatcgacgcggccgtgaacggggcgggcggagccgccggccttctcggaaaagccctcgcccttctccagacgggatgggtcaaggattacgccctggccatcctcctcggggccgtcgctttcctcggagtcctcctcttctgacatgaacatcccgctgctgagcctgatcaccttcctcccgctggccggggcgattctcctcatcttcatcccggccgccgaacggcggcgcctgttcgccgccgccctggccgtcacgcttgccgtcttcgtcctcgcctgcctgctagccgtccgtttcgacggacgcgaggccgggcctcagttcgtcgagaaaagcccctggctgggctatgggctcggctaccacctcggggtcgacggcctcagcctctttctcgtcctgctggccgcttttctcacgcccctggtcgtctgggcctcggtctcgtcgatccgcgaccggttgaaggaatatctcctattcctgctcctcctggaaaccgggatgatcggcgtctttctctcgcttaatctcttcctcttctacgtcttctgggaagcggccctgatcccgatgtatttcttgatcggcgtcttcggcggaaaacgccggctctacgcgaccacgaaattcgtcctcttcacgatggccggaagcctcctgatgctggccggcatcttcgtccttcacggagcctacgcccgcgcaaccgggacatattccctggacatgttcgacttgggccggatggtcctctccccttccgcccagacctggctctttctcgccttcggcctggctttcgccgtcaaggtccccctgttcccgttccacacctggcttcccgacgcccacgtcgaagctccgaccggggcttccgttctcctggccgccgttctcctcaagatgggcgcctacggatttctccgcttgggttttcccctcttccccgaggccgtcgcccgcctcgctccggtcctttccgggctggccgtggccggcattatttacggcgggttcatggccctcgtccaaaaggacatcaaggcgctcgtggcttactccagcgtcagccatatggggcttatcctgctggccgtgacggcttggaacacggtcagcctccaaggcgcgatcctccaaatgatcaaccacggcctgagcacgggactgctcttcttcggcgtcggcgtcttgtacgaacggacccgggcccggggcgtctccgacttcggcggcgtcgcccggaagatgcccgtcttcgccgctttgtttctcatcgccgcgctctcgtccctcggccttcccggactcaacggcttcgccggagagatcctttgcctgagcggcgtgttcgccgcggataaaatcctggccgccctggccgtcacgacggtgattctctcggccgcttacctcctgggcatgtaccggaaagtctttcacggccccgtcgcctccgggcgcgtggccgctctccgggacatcggcggacgcgatctggccgtcttcctccccgttatcctcctgatgttttggatcgggctctttcccgggaccttcctgaaaaagatcgaggcgaccgccgtccggtatgccgacgccctgcaaaaccgccggaccgcatacgtccgggtggacggccgtcccgcttttccggcgatcgtctccggaagcggcggcggcgaggaaaaagcgcgatgagcggaccggtcgttctcgccccccttctcttccttgccggcggggcggttctcgttttgctcctggggacgcgccgcggcggaggatcgaattccgtccaagccgcggtctccgtcgcggccgcggccgcggccggattcgccgccgcccgcctctggggccggccggccgaggcgttcggggggcagctccgatgggatgagccggcgcttttcctcgcgttcctctatcttttggcggccgtcctggcgatccttctcgggatgcgcttcatcgttctccgccggatcccccgggcggaatattacggccttcttctcctggccgtctgcggcctcatcctgatgacggccacccgccacctgctcgtcgttttcctcggcttggaggtgttttccatctccgcctatgccttgaccggactgaaccggcgggacgacggttcggccgaggcggccgccaagtatttcctgaccggatccttcgcctcggcctttttcgtcttcggcttggccctgctgttcggagcctccggcacgctcgacctcgacgccgcggccgccgggctcgccggaacgggggcggttcccgccctggccgcggccggattgatcctggttctctgcgggctgggctataaaatcgccgtcgtcccgttccatatgtattttccggacgtcaccgagggcgcgcccacgccggccgcggcgttttttgcggcggccccgaaagcggccggattcgccgtcctcctccggattctcttcgccttcgcccgggcggggatcggggccgggccgatcgcctccttcctgagcgcggccgccgtcgcgacgatgatcctcgggaatttcgccgccctccgccagcggaatctcaagcgcctcctggcgtattccggcatcgcccacgccggatacatgctgatcgccgtcgtctccggcgatccggccgggctgttgttctacctggccaattacctgttcatgggggtcggggccttcgccgcggtcatcgccctggccgggccgaagcgcgaaacgctcgagctggacgactacgccggactcggccgccggtcgccctgggcggcggggatcttcaccgtgatcctcatctccctggccgggtttcccccgaccggcggttttttggcgaagttcttcgtcttcagcgcggccgtccgggccggccgtctcggcctcgccctcgtcggcatcgccgccagcctggtttcggtcgcggtctacctgcggatcgtccgggtcatgttcatgaaggagccagaacgggagatcgaggtcgacacggaaaattaccccgtctacctcgccttgttcttctgtctttacgccgtcctccagctcggcctctttccgggcggcgttatgaccttccttcgcggcgcggtcgcgggcttttaatccgtcgggagtcatggaatggatgatctgattcagcgtctccgcaaagagcaccaggccgttttcggcgtcgaacccgcggtcgtcgcgtacgcccccgggcgggtcgagatcctgggcaaccacaccgattacaacgagggcttcgtcctgtcggcagccatcgacgccgggatcgccttcggtctctcgccggccgacgaggatgcctgcaccctgcgggcggccgacttcggcgagagcgttcgttttcaggccgtcaatccgggacggacggaccgggagcgctggtcgaactacccgcgcggcgtcctggcgttcctccgggaacgatacgggttccgtccccggggattccaaggaaccttctgcggcgatatcccggtggcggccgggctttccagctcggccgccctggaaatctcctcgggcctggccttttcggctttccacggaatcgtcgccgagaagcttgccctggcgaaaatcggccagcgggccgaacacgagttcgccggcgtgcgctgcggccttctcgaccagatctcaagcctcttcggccgggaacaggctctcgtcttcacggatttccgttcgctcgaagcggacaccgtttcccttccgcaggggacggctttcctgatcgccgacacgggggtcaagcacacgctggtcgactcggaatacaacgaacggcgccggcggtgcgaggaggcggccgcggcgttccgccgcatcctcggccccgggatcgccgccctccgggacgtgacgcgggcggacatgatgaaataccgggaccgcctggatccggatgtttggaaaagagccgcccatcccgtcggggaaaacgaacgcgtcttgaccggggccgaagccctcaagcgcggagacgcggccgccttcggccgcctcatgttcgaatcccatgaaagttcccggaaatatttcgaaaattcctgtcccgagctcgacgccttggtcgaggcggcggggaagatccagggggttctcggcgcccgcctgagcggagggggattcggcggcagcgccgtcgtcctggtcgaaaaggatcggtccccggcgatcgccgcttccctggcttcggcttatgccgccgcccggggccgccgcctcgagccccggatcgtccttccgtcggccggcgcccggctcgtcacctgagcgccgggaggccgggacgctccggcccgatccggatttttccccaggcgaagcggcaagcggccggccgaccggcctccgagcccgtcttcctccccgcgtcccgtcagaccgcgcggagtttcttcatgtccgcggccgaaggacggttcgggatcacggccacggtcttgccccggtattcaaagacttccttgtcgtcgttgttgatctcgccgatatgctcggcccggactcccttggcccggaccgttttcaaaatgagatcgacgtccttcttggcgacttggacgaccatccgcgcctgggtttcgcaaatcaggatttcctcgggcgagaggttcttttccttcagcgggaccttggaaagatccacccgggccccgaaaccgccgtaccgcgcggattcgcaaacgccggccccgacgccggccgcgccgagatcggagcacgcccggatcttccccgtgcggaacgcggccagggacgcttccatgaccttgcgttcctcccggaactgggcgacggccggcttcatttcccggaccagcccggcccggtagagggtgtcgttgccgtcgcttcccgtccggccgatcaggatgatctggctgccggcggccttcgccggcttggtcagcggccgggacgtgacgaggcgtcccatcaccgcgacgacgacggccgggacgatatccgaaaacgacgtggagaacccgccgccgacgatgaagacatccatggcccggcacatgtccttcaatcccttgaccatcaagttgacccgctctccgctggtcatctcccggcactgcccgcaggtgcatttccccttgaagccgcacgggccgacgatgaccttctcgtccaggggtttggtcccgatgaagttcatcaggaaaaacggccgggcgcccatggccaccacgtcccgcatggatccgccggccccggtggccgccgcgtcgtacggccggggaacgcagggagagcaatggctctccattttgccgacgaacatgcccggcgtgccgggaaacttgaaggcggcggcgtcgtcgcccgggccgacgacaagcgagccggggaacagtttgccgacttttttattcaaggcatcgatggccttgaaatcgatggccttgtcgatattgtggtggagatggacgaagagcgcatgcatcaaggctttttcgatgtcgttcatgagcgggcctcctggacggttggattctttcgcggattgcgcggcctccatgttaccccatcccgacggcggttgtaaatcgggttgcccgggattcataatgcccccctcgaaacaacccggcactccaccccagaagacgttttcaccgggcggtgacggggcatcatgcgcggaagccctgaagccgaggcgcatgagcgggagttttcacgccgacttgacgctccgattcaggccgttgacaggcggggccggcggccgatatattcgtttcatgaacgaccgcgccccgcttctatcccgggcggtccgtgggaaaaaaggcttccggacggccgtctttgtcctggtcctcgcggccgcggcggccgggccggccgccgcccagcaagcggtcatcctggtccgtcacgcggagaaagccgactcctccaaagactccgccctgtcggaggcgggccgggcccgggccgaagccctggccgtcctcgtcgctcccctggaaatcacggccgtctatgccagcgaataccggagagcccggctgacggccgagccggcggccgccgcattaggattgaaggttcagacatacgccgccggcgacgcggcggggctggcggaaaggctccggacccgccatgccggcgacacggtcctcgtgatcggccattccaacacgctgccggaattgatgcggcgcctcggccacccgtccgaggaaatcatcgccgacgatgattacggcagcctcttcgtcctgctcccccaaaccggcgacacgccggtcgtcgtccggctccattattgattcggcggggaggccggcccggccgaggcggccgccggacggattccgggcccgtcgaaaaccagttccacccgcgcgatgacggctccctcgaggatcctgtcgacgacgtccatcccggaaacgacccgggcgaagacgcggtattcgcggttcaggcggtcgttgtcgacggtgttgatggaaatccgggcgtcgccggcgtcgcggccgcgggtggagacgccgacggttccgcacgcgttcgatgcccggcccgtctcgtctcgcctgaacgggccgtctcccgcgtactcgtcggtccgcgggctggcctccctggatgaggaagccggggacggcgcggtggaacgtgaggccgttataataaccattggtcacgagggcggcgatccctcgattcctcaatgatataaattgatcgatgcatttccgtttgttatacttttatttagagggaggcggaacggttgatgagaagaaattccgctcgcaaccgcggcaaggttctcgttcttatcagcaaacgggacaagccggatttcatcaatagactcatcccctttcccgcctcgttgagagtcgtggaatccagaaatcgcttcccgtctcaaagcggtttttcgcttgtctttcatgtttgtgattattcttgtttgacgcggaattgtcttcgttcttttatttctcttcagaggttgaacacccccattgtcgtcctgaggccggcgattttttcgaaagccgcgggcttttcgaaaagtttttttctcacgttcttcgacgacagcgtcttgtcaccccggcagcgggagatgaaggaaacctgcgaaagatcgcgttattatggatggggccaagggcggcttcatccctcggatcctctccataaagtcctgctcattcagaaagacgtcgtcgagaatccatggcggaatcatgatcttgccggcatttccaagctcattcatcgaagtccgtcttggacctcatcaacattcaaagagttgaccggcgtctctttatgccgttttgtcatcaataatcgcttttgttattccttgtggaaaattctttcgtcggacaagtcaataaaagaaatcgcgctcgacctcggctaccgccccctttccttcagcggccgttttcgttcccagtttgggatcaggccgtcgcgggtgataaataaatacgcctatctatcacgggggggatcttcctcaattaaaaacatgcaaataaaaaaataatcgatcatattatcttttttatcggcttatttcccttgagaaatcggatgatttgcttatatatgaatatacaggtgaaaaatggaaatggggagacatcttgtgcaaatacttactgcgtgggttattggttcgcgccctgtaacacctatgattggcgatgtgaaaattgctggccttgcaaaacgtcttgtttttatcaagccgtttatatcgtctgtacggacaacgaggggaatcaatggtggttgcagcggtgcataacagggttttgccacggatattctccgctttcgaattatcaattgaagcaaggagacgggaaatgaataaacgatttttattcgtttcgtttttgccgatggtcctttgtttcgctcattcccaaaacttgattctcgaacgagaaatcgacctcggcttctttctcaaacctcatcaggctcatctcgttttcgccgcctcggattccgcgggaaacgtattcatcacgcagcggggaaacgactcgttcctcaaactcgatcgggcgggaaaggtcgttttaagagctccccgccggaatgaaggagagattatcaagttcgatatcgacggctacggcaactctgtttgcgttttttcgggaagactggaagaaggcaagttccgtcttccgttggcttggtacaacggatccaccggggagaagttgaaggaaatcaacctgggcgaacgattctcttttatcgcccatctgaggattctcaggccgagggatctcatcttggtcaacggcatcgcgagtgaagaaggctttagaaacgactctcttcacctcctcgatttcgacggaaaccatgtgaattccttttcccccttcgggaatcaaggattgacggtagaagccatcctcgaaagaaacggggattatttcgcctcttccccgcaatttgattcgacgaaccgaattgtttttcaagccttgcctgaaatgaagctgatccgatatttcgatttggcaggaaaccgtttgggagaaacggattgggccgaaagagatcattttttactgcactcggggaatatttggtttcagggcgcggagggtttccgcgtggtcgagaaaaaaggaaatcaatatgttccgacaaacgttaatatcagggatgccgatggggcccgcgttccctggcatcccgtcgccgtcgattcctatggaaatatctattttctcggggggaaagacctgcaatcgctgatcatctacgctttgaaataagattcgttgattgctggaggcgctacgacaataattaattagagtgcccgggggagcggatatcaagtccgctccctcttcatctcgtcatatgagagcgtgaacgatgaagaaaacgcttatcaatttattatctcctctcatgatcgccggccctttcgttttcgggcaagatattcgtctcatcgataaaattcccgtctctcagcaagattgcttgatagaagcggatgatggaatcgcggtcctgcccaacggttcctttatcatctgcgacacgcgggccggcaatttcaaaatattcgataaaaacggacgattcgtcaaaatcttcggaagacgggggaacggaccggatgaattttcttacccgacgatttttgattattccgacaataagctattgatttcgaattctgagaaatatcgtatccttgtttatcatgtcaatgaggatctcgaaattaaattaggagaagaattcttcggttattgctgtgacgccaggattttcccggatcattatttattttcggggtcgaaagcggatcccgccggcaaatggtatgaaatctatctctcctatccgcgacaaaagaaacattcgtttttattgacgctccaggatttattcaatatctctcccaacgcgggtcagcctcaattggcggaaaaagcaagcatgggcgttcgctcgtattgtgattctcacggagatcacgtctatgccgtatgggaagggctgttaagcgtcatacgggtggacacgaagacgaataaacagtaccggtttgggaataaaacgtcattatatacggcgccggtggcatcaaaggaactgattcaggcaaaaaaagagcggaatttgaaaaagcattttaagatcctttttaattattccataattcgaaaattatttgttacagatcgttatatcggcatcgtgtatatgaattatgaccgcgaaatcgatctattgaatcccatcgttcaactatattcattggatgggaatttcattatggagaaaaagctggatcaagtgacatatccccatatgcttatgtcattatattacgataaaaaaacgaatgtcttatccgcgctgtccctgaagatcgacgaccaagccgaatctcattatacgttattgaaatatcaaattatttaatgagaaaatcgccggcgcgtgtgccgtgacgttcacgatttgaaatcggagagaccacgggaacgaagacaagctaagggaagcggtcatgtagggcagaactcacggccgtatttttttacacgccggaggcgtgtgaaagacacggccggagcggcccataagccggattctgttcccggcgccgaagcgccggggacggtcatttttctcgccccgcggttgcccgcgggatccagcggccgacccgcccccgggacgggcgatcccatggggggcacgtttggccttgctccgggtggggtttgccctgcccccgatgtcaccaccggggcggtgagctcttacctcgccatttcacccttgccctggcgggcggtgtgttttctgtggcactttccctccggtcgcccggggtcgccgttagcgaccaccctgccctgcggagtccggactttcctccccctcttccttgacggattcgggagcgaccgtctcgtccactccggccgtgatcttgattccgtactgctcaagctttttataaaggttcgagcgcggcgtgtcaatctcccgggccgtccggctgatgttccagccgttggcctcgagcttggccaggaggaattcgcgctcggccaagtcgcggaaatccttgagcgactggaccttggacgcatcgggaaggacgacgcccttctccccgcggatctgctccggcaggtcgctcttctcgatccggtcgccctcggtcatgatcaacagccgctcgaccacgttcctaagctcccggacgtttcccttccaggagcagcgggtcatcacctcgaccgcctcgggggagaacgtcttgaccttgaagttgttctcctcggcgaacatccgggcgaaataatcgatcaggacgggaatgtcctcgcgcttctcgcgcagcgggggcgaagacaggggcaggacattgagccggaaatacaggtcgctgcggaagagattcttctcgatctcggccttgaggtctttgttggtggccgcgatcaccctcacgtcgaccttggagatcttgtttgatccgaccttctggacctcgccttcctccaggacgcggaggaccttggattgggtcttaaggctcatgtcgccgacctcgtccaggaagatcgtccctccgtcggccagctcgaacttgcccggctttttctcggtcgccccggtgaaagcccctttctcgtggccgaagagctccgattcgatgagctcctccgggatagccgcgcaattgacttgaatgaaggcttccttggcccggaggctccgggcgtggacggctcgggcgatcagctccttgcccgtgccgctttccccgaagatgaggaccgtggcgttggtcggagcgaccgcctgaatgtcccgccagagcttcttcatcagggggtggttgccgacgagctcgtaccgtttctccgccttgcgccgcagatccaggttttcccgggccagcttgttgcgatccagcgcgttccgcagggtcaggaggatgcggtcccggtggagcggcttttccaggaattcgaacgcgccgagcttggtcgcctcgaccgccgtctggaccgtcccctgtccggagatcatgaccacctcgggcgggaaggggcggttgcggatctccttgaggatctccagcccgtcccggcccggaagatggatgtccaggaggacgaggtcgaggccgggaatctcgtcgatcgcctgaaggccggattcgccgtcggccgcctcgtaaaagatgtacccgtcgtattccaaaatcatcttcagcgacttgcggatgttctcctcgtcgtcgatgaccaggatgcgggctttgcggtcaagcttcatgcgtttcgcctcgatctcaggccgattttaacacaggagcctccctctccggaaacgcgccggcgcctcctcttgaaagtcccctctcttcgggcccgccccggcaggaattttacaaaaaacccgtcccttgtaaaaaatcttcccggctcccttccgccccgggcgccgacggcgggcggaaattcttttttcccactccccaagcgctcgaaaaccctgctttccgcggattctggaacctccccgtttcggtccgcggctccgtccgccggccaacccgcccgattcgcgagtcaagacaaccgccgtctgatccgctgaagataaaaacgaaaaacgggtttaatgaaaggcggatttgagaacgcccgccgcggggccgggcgttcaacaatccgctcctccggcgggcgagactttggaaggatgacaagccccggctgacacaaagattgctttttctctccgcaaggaaaggataaaataaacccgagcggagacatgatcgaaaggaaggcggaacggcggccggcggccatccaaggggcggccctcctccttctggccggcgccgcgacggtcctgcttttccccccgctcgtccggccggcatcctccccgcaaaaacaattcaccctggacaacggcctgcgcgtcttcctgctcgagcggaattccgttcccctggtgaacatcgtcgccggagtcaacgcgggttccaaggacgaaaccgacgaaacgtccggcttgatccatctgctcgagcactacatccttttccggggaacggacgttcgttccggaagcgagatcgcccgggatatccgtagccgcggagccgtcttcaatgcccacaccggccaggacgcggcgttcttcgacctcaccctgcccgccgagcacttcctcttcggcctgaaaaaccagaaggaaatcctcttccgaatgaaaatcgaggaagaagggctgaacgccgaaaaagaagtcatcggcgaggagatccggcagatcgaggatgatccgttccgcctgggccaggcgctcgtcttccaaaatctcctggccggccatccctatggacggcccatctacggcgaccccggatgcttggccgatctcacggccggggatatcgagcgcttctacaagaggctgttcgttcccaacaacaccgtcttggccattgtcggaaacctgccggtcgacgaaatggaagcccgcgtccgggaggtcttcgccgacgttccccggggggaggatcctccgcctccgccggaattcgcccgccctccttcgaagacggttgagatcgagcgggagctcgacatcagcgaagcttaccttttcgtcggcgtcctcggccctgattacaacgacccgggacagtacgcggccgacgtcctcacccagatcctcggtcagggcatccacccgatgatgaccgtcgccctcaagaacagccgccgggcgggagtcaactcggcgcatttaagctacatcgccttgaagcgggccggagctttcgtggcctatatcaccctggaaccatccaagatctcggtcgccaagcgcgagacgatcacctttctgaagggagtccgcagggagaatttttcccctcaggatgttctgatcgaggaccgggcggccgccttcgatctgctggagagcgccaagaataaaatccgctttctcggccagcaggcttgggaaagcggtctcggcctggcgtcctcgatggccgcccatatgctcctcgccggcacggagtcggaaatcgactacctggagaggatcgccgccgtgacgtcgggcgacctccggaaggccgccggcgcgtctttcaaccgcgacgccttcgtcatcgtctccatcgtcccccgaaagaaatgaaatccttcccaaggcgcgcatcctccggccggcggcccgcccgcccctggttccggtttccggcggccgccctcctcgccgccctcggcggattcgccgccgggcccgcattcgccggagcgcaggctcccatcctgaagaaggttctgcccaacggcctcacggtcatcacccagacggacgcctcctcggcgatcacggtcgtcgaaatcgtcatcggcggcggggcttcagccgaacccggcggccgggctggaatcgcccatctcaccgcccggctgtccgtcaacatccccgacgagacgaccagccgcgacttcacggtgaaagccctcaagagcgggatgggcgcgcgcgacgacgacgccgtcatccacctggaatttctaacggagttcgccgagccgatgctggcgacgatcgctaagattttcaaccggccgatcttttcggacatccggatgaaccggctcgtcgaatcgatggagcaccagcgccgcattcagatcgacgacgcccggtacgaatcccacctcgtccagcgggagacattcttcggcgattccgcctatgccggcgagacgctcgggacggaggaatcgctccgagccttgagagtccgggacgctcgggatttctacgagcggctgttcgtcgccggcaacatcaccattgtcgccgtctccgacctggcgcccgacgccctcggcgctttgatcgagcgccatttcgcctccctccgcccgggagccccgccgccccccccggccgctctcgtcctcaaggatcccccctacccgccgaggatcgtcataaaaaagcaacaacagagcgtcgtctcctgcggctttatcctgccgtcgatgagccgccgggactacgtccggatctccctcattgaaaacgccctcggccggggcgtcggctcgcgcctgtggacgctgcgggtcgatcaaaagctggcctacaacgtctttgcccaagccttctttttccggagggcggggctgttcgaagcttacctcgagacggacgccccaaaaaccgcctcggcccgggaagccctggccgaggttctccgggacttccaggagcgcggcttaaccgccgaggagctggaagccggccgggccattctgtggtccggcttcctccgggccaacgagaccaaggcagcccgggcgacgaccctgggctggtatgaatcgatgggactgggagcggatttttttactcatttccgcgatgagctctattccctgaccctggatgaggtcaacgccgagatccgtcggctcatggatccggcccgggcctcctgggtcacggtcggtcccgaacaataatcaggggatgcatcccctattgacgccagcgaaggatcggcggatacttgcggaaagggaggccagccatgaacatcgcgatttgcgggcttgattgttccgtttgcccggcttacgtcgtccaccaaacgggggacgcggcgcttcgggagaaaacggccgaagagtggaagaagcaatacggcgcggagatcactccggagatggtggattgcgcgggctgcaccgtcttggaggggccgcacatcggctactgcttcgagtgcgaaatccggaaatgcggcttggaaaagaacgtcgcgaattgcgccctgtgcgacctctatccctgtggcgtcgtctccgccttcatcgacaaggtcccgccggccaaggcgaaccttgaaaaaatccgggccgaggctggagccgtgccttcggccaagaccggagtcgcggccaagccccggggaaagatcaaacccaaagcgaaacccaaggggaaagccaaggcgaaacctaaggtcaagccgaagccaagggtcaaacccaaagccgcggccaaagccaaggccatggcgaagcccaaagcggccaaaaagccgatgaaaaaggtcaagcccaaagccaaggttaaagccaaggcgaaatccaaaaccaaaaagcgctgaacggcggcctttttcctgatctccgtctctaccgagacaccgtcgcgccgggcctcgatgtccaagccgagggcgtcctcttgagtccggggcaatactcccaggacggatctcgttgcatcgtcagccccatccgggagtcgacggggaggacggattcggcgcttggggggctcgacgctgacgcttgggacgaaaaccgtctttgcgcggccagcgacggacagtctcccgcccgatccgaaggccttccttttccgccggcatctcgacgaagcggcggttaacagcccttgcctccatcgagctttacatcggctcaaagtgatcatctcctttgtggcagcctcccctcggaaggggacattttcgctttgctatcacaaatttgcggcccggcgttttcccggcggcgcaattcggttataatattctttcgacttcctcaaatcgaaaaccaatcaaaggagacttgcccgtgtcctttccggaatccctgctttcccaaaccacccggtcgatgggcgtttcgttcatccgggagatgatcaaggcgaccaagggggtcgaggggatgatctccctggccggcggcctgcccagccccgattccttccccaaggaacagctcgcctcgcttttcaaggaagtgatcgaaaaggaaggggccgatgttctccagtacggaccgagcgaaggggacgattttctcaaggagcagatcctccggttcgagaaggagcccggcgtccttaaggaagagctcctgattacggacggcgcgaccaacggcatctatttcttcacccgggcggtcatcgatcccggcgacatcgtcatctgcgaggggccgtcgttcaacggcacgctcgtcgcgatcgaggcctgcggagcggagctggccgccgtgggcatggacgaggaaggcctgctcgtggaccgcgtccgggagacgatcctcgcccggaggaaggaaggccggaccgtcaagttcatctacacgatccccgagtttcaaaatcccagcggccggacgatgagcctggcccggcgccgggagctgatccgggtcgcccgggaattgaatgtcctgatcctcgaggaccagccctaccgcgatctccggttcatgggccggcggatcgattcgatctgggacatcgcccgggccgaattcgacgacgcccgcaccgtcacgatctgcaagtccttctccaaggtcctcgggcccgggttgcgtctcggcttcgccgccgggccggccgatctcatcgcggccatggccaagtgggcccagaaggtcatcgtctcgcccgaaggcgtggtccagcgggtcgtcgcccggttcctggaacgcgaccttctcgaaccccacatcgagaagatcacggcgatgtaccgccacaagcgggaagtcatgatttccgccctcaaggagacgatgcctccatccatccgctggacggagcccgagggcggcttgttcatctggctgacctgccccgagacatatgatacggacgttcttttccacgaggcggccaaggccggcgtcgcctacatccccggaagcaagttctacccctcggggacggaaaaacggaacgaaatccggcttaatttctcctacgcgacggcggaagacctgcggacgggagtcgcccggctggcgaagatcctgagccgctgagcggccgggcggacgcggagatccgccggctagtcttgggccagcaggctcgcccggatcctgttggaaatcgaataccaccgctggaccgtgttttccagccggtaataatggaagacgtaagcggttaccatgacgagcagcatccccgtgagggccagcatggccggcgaaaaccgccacatcgtgaaccccagggacaagacgaaaaacaatccgaaaaacaacgtcgtgatcaggtgagccaagcgctcttgttgaagccaagcgatctgtttatcgtgaaaggccagaagctcggctaaagccggcttgcccggggcggacgccatggccttcagcagattccgttcgtgtcgtttcatatagcgggtcatgatgacgaaatcatatttccggccgggagaacgtgtcaagaagacgattcgggagggccggatcccccgctcgcaaaaaaaaaacgccccgccgctcccggtcaagggaacggcggggcgggcgcggttcgagccggccttcgccggcgtccttttactcggccatctttttataaaccgcgtaacgcctcttggcttcctcggccgcccgggcaaacagctccttggcgatctcgggatactgctgcgtcaacgtccggtagcggacctcgttcttcaggaagtctccgtaggccagtttcggctccctggagtcgagctggagcggattcttcccttccaaggccaggagcggattgtaccgatagaggatccagtagcccgtatcgacggccagcttttcctcggcctgggtcttcttcatgtcgattccgtggttgatgcacggagcataggcgatgatgatcgacggcccgttgtacgcctcggcttcctggaaggccttgatgcactggttcatattggcgcccatggccaccgcggccacgtaaacgtagccgtaggtcatggccattctgcccaaatccttcttggtcgtcttcttgcccgaagcggcgaacttggcgaccgacccggtcggggtcgccttggacgcctggccgccggtgttggaatagacctcggtgtcgagaaccaggatgttgacgttccggttcgtggccaggacgtggtccaagccgccgtagccgatgtcgtaggcccagccgtcgccgccgaaggaccagacgctcttttcaaccaggaaatccttgagctcgtcgatcttggccaggtgaggcttggctccgtcggcgctcttgagcgcgccgggcaaggccgcccgaacggccgccgcggccgccttggcttcgccgcccgtgtctttccaggccgctttcatcttggccagggcgtcggccagggcgggggtcgttccggccgccaggaccgcctcgatcgaggcggccaacagcttccggttggcgtccaccgccagccgcatgccgaatccgtactcggcgttgtcctcgaacagggagttgccccaggccggccccttcccttccgccgtctggcagtagggcgaggtcgggaacgtgccgccgtaaatggacgagcagccggtggcgttgccgatgatcatccggtcaccgaaaagctgggtggccagcttgatgtagggcgtctcgccgcagcccgagcaggcgccgctgaattcgaacagcggccgcaggagctggctgcccttgatgctgtcgcgcttgttgccgtccaggacgtcatagggagctttctcgaagaaggccaggttctcgttttcccctgccttccgggcgtcctcgatggggaccatcttgagggctttgaccttgctgggacagacctcgacgcagttttcgcagccgacgcaatcctcaacgtaaacttggaggcggtaggcgagatcccggtcgttcttggagttggacttgatcgtcttgaacgtcgccggagcgcctttcaaatcggctggagcgatctgtttcggccggatggcggcgtgggggcagacgagcgaacactggttgcactggatgcaattttccgggatccaggccgggacctcgaccgcgatcccgcgcttttccaggcaggacgtggccgtgggaatgacgccgtcaaacggcatcttggagacagggagcaggtcgcccttgaagcgggtgaccggatcgatgacatccttggcgaacgcggaggcgtcgtcggggacgatctggatcatcggagcggccttggagccgatcttatccggaatcgggacggccgccaggccgtcggaggcatggtccacggcggcccagttcattttaacgacgtccgcgcctttccggccgtacgtcttttcgatcgccttcttgatcagggcgatagcctcggcttcggggagcacgcccgagagcttgaagaagcaggcctgcatgatcgtgttgatccggaggcccaggccgagctcgccggcgatcttgtaggcgtcgatagtgtacactttgatcttcttgtcgatgatcgtcttctgcatgtccgcggtcaggttctcgaagacctccgaggcgttccagttggagttgatcaggaacgttccgccctcgcggatcccctcgagaatgtcgagacggccgatgtaagacggcttgtggagcgcgatgaaatcgacggtgttgagatagtactgggactggatgggctgcttgccgaagcggaggtgggagatggtcacaccgccggacttcttggagtcgtactggaaatacccctggccgtacatgtcggtgttgtcggcgatgatcttgatcgaattcttgttggcgccgacggtgccgtccgagccgtagccccagaacttgcagcggaccgtgccgggaagctcggtgtccagaaccgggccgacggggaccgaaagatgggtgacgtcgtccgtgatcccgacggtgaagctgtggaaggcttttccggccaggtggtcatagacggccttgacctgggccggggtgaaatccttcgaggacaagccgtagcggccgcctatgatttttaagccggagccggcgagggccgcgacaacgtccaggtaaagcggctcgccgatggagcccggttccttggtccggtcgaggacggcgatccgcttgaccgacttgggcagcgctttcttgagggcttccacgtcgaaaggccggtagaggcggaccttgatcagcccgagcttggagccgcgggtgttgaggtaattgatcgtttcctcggccgtttccgcgcccgaacccatcatgatgatgacatcctcggcgtcgggggctccgaaataatcgaagagatggtactgccggccgatcgccttgccgactttatccatgtaatgctgaacgagagccggggcttcttgatagaacttgttgatcgtttcccggccctggaaataaacgtccggattttcctggccgttcttcatcgtcggccgttccggattgagcgaccgcttccggaaatcgtcgaggtattgcggctcgaacaagccggccagggtctcataatcgacgacgtcgactttttcgatgacgttggacgtccggaatccgtcgaagaaatgaagaaacggaatccgggtccggagagtcaaaaggtgggcgacgatggccaggtcctgggcttcctggaccgagccggcgcaggtcatggcgaagccggtgttgcgggccgacatgacgtcgctgtgatcgccgaagatcgagagcgcctggcaggccagggagcgggccgagaccaggaagaccgtggggagcatctccccggcgatcttgtgcatgttcgggagcatgagcatcaagccttgggaggcggtgaacgtcgtcgtcagggcgccggccgaaagggccccgtggaccgcgcccgaggcgcccccttccgactgcatttcgaccacgtccaccgtctggccgaagatgttcttcttgccctgggccgcccattcatcggccaactcgcccatcgtcgaggagggcgtgatcggataaatggcggcgacttcggaatacgcgtaggaaacatgggtcgcggccgtgtttccgtcgatcgttttgaagtttttcttcatgaaccaagctcctttgccgccgcgcgaaaacggcgttttcgtttataactcgcggaatatccgctgtttaatccgaaagatccgtccgcccttccaaggccttgcggacggtgacttggtcggcgaaatcgatgtccgacccgaccggcaatcccatggccaggcgcgtgaatttaatattatacccctgaagggccctcacaaggaagtgggccgtcgcctccccttccgaggtcgggttggtggcgatgatgatctccttaaaacggccgtttttcaagcgctgctcgagcttttcaagacggaggctctccggcccgatccccttgagcggggccagggcgcccaggaggacgtaataccgtccatggaagacgccggatttctcgatcgccgcgatatggaagggctcttcgacgacgcacaagcactcgtcgccgcggttcggatcggtgcaataggaacacggatcggcctgggtgatattgttgcagatcgagcaggacagcaggtttttcttcaggtcgcggattgcatcagccaggcgctcggcgtcgtcctggttgccggccagaaggtgaaaggccatccgctgggcgctcttgctgccgatgccggggatcctcttcagctcctcgatgaggcgtccgagaggaggggcgtattcgttcatcagaacatcccggggattttcaggcccgcgcccaatccgccgagcttgtcggccagggccgcgtcgaccttggccgagccgtctcggaacgccgccaggatcagatccttgagcatgtcgatgtcgtccttgttgacgacttccggatccagcccgatatcgaggacgtttttctgtccgtccagaacgaccgtcaccattccgccgccggccgagccctcgatccgcatctccgccgtctcccgctggaggcgctcctgcatttccttggccgacttcagcattttctggatgtcgccgaaacccttcatctttcctcactcctcgtctttcggacgcggcggctcgggatcttccacggaaatgacccggcccttgagcttttcctggaacatccggacgttttcattcttgagcgcggcatcccggcctgtttcgcgctcgcggcgggccgcgcgcagggcggccgacgcgtcctcgcgggctttcggctcggtggccggatcgctcgaggcggccgggcgcgccggccgcgccggagccggtgttttcgcggaagccgggggcgccgccgcggcggccgcgcgccgctggatgaaggccttggcggcgtccagggccgacggcttcgccggggaggcatacgccgccggagccgccggcaccgccgcctgaggccggatcgccgccggccggacggtcgcggacgacggccgaagagccgtcccggcgcttcccccctcgagaccggccaaaacgtccttcagctcgaccagcttcccgaaatgacagagacggaccaggatcgtttcgaaagcgatctgcggctgggaggaatatcggaggccggcttccccgtcctggagggcctggaggaaccggagaagctcttccccgccggttttctccgcctccgtccggaagaaggccaggtccgcttcgcccagatggaggatgtcctggggcttatccatcgtccggacgatcaagagatcgcggaaatgctcgatcaaccgcttatgaaacgtccggaggtcgtagccggaatcgacgactttctcgacgagcggaaaaatccggtccggggcgccggcgatcacggccgaggagaattcgaacaagagatcgcggttgatcgttcccaggatcaggtcgaggtcggcgtcggcgatggtccggccgcagaaggccaccgcctggtcgagcagcgtcaggctgtcgcggacgcttccctcggccgcccgggcgagcagggcgaagccgttttcagtgagctccagcccttccttccgggcgacatcgtgaagatgattgaacaagtctttcggggagacgcgcttgaactcgaaatgctggcagcgggagatgatggtcgccggtactttttgcagctcggtggtggcaaaaatgaacagcgtcttttccgggggctcctcaagcgttttcagcagggcgttgaacgccggcttggagatttggtggacctcgtcgatgatgacgaccttgtaccggctcttcatcgctttgtaccggacaaggtcgcgcaagtcccggatgttgtcgatgcccgtgttggacgccccgtcgatctccaggacatccagctggcggtcctcctggacggcccggcaggattcgcagatgccgcagggcgtcggcgtcggaccctgttcgcagttgagggccttggccaggatgcgggcggcggtcgttttgcccactcccctcgtccccgaaaagaggtaggcctgagcgacgcggccggtccggacggcgttttgaagagtctggacgacggctctttgaccgaccatttcctcaaaggtcatgggccggtatttgcgggctaagacggtcgaatgcggtgtggacatgctgttttccgggtgtaccgccgggaggatcaatctcccgaagagtacggattaatttaccacaaaccgggtcttccgggaaaggggatttttgttataatcggggcgccgtgagccgatcccgaagcctgttggccgtccatgcggccgtcgcgctgttcgggttggccggtcttttcggcaagtggctgacccttcggccgcacttcatcgtcctcggacgggtcgttttcgccgccgcggccctggccttgatcatccgcctttccggaggccggttttcgatccgccgtaaaatcgacggcgggctctttctccttcagggcttgatcctggctgttcattggatcctctttttcgagtcgatccgcgtctcgaccgtggccgtggggctgctggcttattcgagcttcccgatcttcacggccttcctcgagccgttgtttttccggacccgcctcagccggcgtcacctcggcctgtccctggcctgcctggccggcgtgttcctcctcgttccgcgcttctcctggtccgagcgcgtttttcaaggcgttgtgaccggcctcggcgccggggcgaccttcgccctgctgagcatcatcaaccggaagctgtcattccggtacgccagccccgtcgtcgcgttctaccaggacgccggggcggctctttttctcctccccgccgccttgctcaagccgccggctcttacgggacgcgacttcgccctgctggcgatcctcgggcttctgtgcaccgccctcgcccacacgctttttatcgccgggatgcggcgcctttcggcccagacggccagcatcatcagcgccttggagccggtttacgggatcgctttggccgccctgctgcttggggaacggccttccgcccggacgatcgccggcggattgatcatcttgacggcggttttcgtcctttccctgtcgaacctgaaaaggaagaagccggcggccgccggtcgagcgacgcccgcttgaacgtaatctcgagacgggcctccgcccgctccacccgtccgtatttcccttggaaatcggagaaatcgaatcccccgcccggacactcggcgatgatcttgagatagggatcgagatgggcccggaggttccgcaggactccatcggccgcctccggcgaggggtaatccgcgacaagacgggtgaacggcggatcatcgccttcccggtaatcggccaggaaggcgaacgtcctcccctccaacccgaggatatccccttccccgaaggaataatacggctggaggccgaccggaccccggatcaagcgctcgcttccggcgacacggccgtcttccgcgagggcggcgaacggattctccagcggaacgtccgggatgcgggacaagacattccgggccaaggcgatcatcgccggacgaagacccgggcccgaatcgtaatgttcgaccttgaggaaatacctccccttgaccgcgacgatctgcgcctcctcgctcgaattgcgggccgggatctccggccacggcgtttcccgcccggcgctcatcaggtaaatgcccagggcggccgccggttcggtcatttcgtacacctcgagaacgagctcgtcctttcccccgccggcatagggctggacgagaagccgggcgaagccgaattccaggaaaagctccgccccgccgttgatatggttgaacaagtctttttcgatgaaggagcgcggacggccggccgcttcccagccgcggacaaatccgccggggggaaggatgtcctgggccgcggcggctccggccagaagagccaagggaatcgccctgaaaagaaaacggcggcaaacggatttcatgaaaacctccggcggcggccgggaccattgtaccagcgggcggacctttggaaaaggcgggtccggccttacggccggatcgagagcgaaagcttcaggacgccccgctcctcggacggcaaaaaacgcgaggccggatcccagcgtcgctcccagttcttgttgtatatcacgtagatttcgtttcccggggaaatcctccaccgcaggcggctgctccatcccagcaggcgggaaacatcatcgtattggatgtaattcatcaagccgaggtcgggggagagaaaaaagtcggccttgacctcgtaaacgttctggctgaagtcgccctgagccaggaaaccgcggacgaggttggtgctgaaggagaggttgacgaacccgtcgaccttgaccgtcaagccggcgttgaagtcgttgtagcggcccgaatagaacgggccgaaattgtaatggaccgagacagccacggagcggcgggccgacgtggagaattcgagcctggtcttggtgaaatcataagccccggccggaaggacgattcccctggaaatctcgaaatcatagggcaggacgtcgcggttcgattcgatttcgaacgtgatccgctcgccgctttctgtctggaacccgaacggcgaagcggtcagccggcgcgtttcgaggttcccggccaagtcccaataataatcggcgctggcggtgaagaagaattgccggacgagagccccgaggaatcccgcggccggcctcggctggaacgaaagacgtccgaaggcggtttgaatgccgcggcgcatcatgaacccgatgccgggattcaaggcgtctccgtagtacgcgtaggtcgtctggatgttccagagatcgttgggatagtcggcccggaagccgaagccgtgatgccggccgtccttcctctcggtccagttgtaagctccccaggcggccagcatgatgttcttgtttccaagaaacgtggatgagctgaaggtgatgtccgccccgaacaatgaatttttctcgcccgagggactgccgttggtgaaaatccagccgatcttgctttgggcgaaaatgttctgggtcatccgggcggccaggaagttgaggccgggccggccttcgtccgcccgggtttggacatcgagcagggccaggttggtatctccgatcttgccgtagagcttggccccgaagagaaccgggaccggcacgccgttgaccagcccgacggcccggctgaagaagggagtgaagctcatgctcgagctgaagctgaacgtctccgatccctccaggaaaaacatccgcttctcggggtaggacatcggaaatcgcgtcaggttgaggcggcgctcgtcggcctcggtctcggcgaaatccatgttgtagctgagcacgccgaccaggttgggcgtgaaactcttgtaaacgtcgaatccgccgtccagccggaaggaggcgcccgtcccggcggcaaagctcttggcgattccggtcaggccgtagggccggaaggtgattcccttgccctggcggatgttctcgatgccttccagggacgccgcctcccgcggattgtagaaattggcgtcccgggagacgccggccagtcggatcgtctcctgcttgcgcgggatataccgttcgacgttgagcccccagaccgaaaggcccggcttgaaggagatcgttttaaagggaatgcggaattcggcgctccagccgtcctcccggatgcgggcggccgcggtccaaatcccgtcccagttcaggctggcgcttccggcatagaccagtccctcgcctcgggcccctcggggattgacgaaaaagacatacgccgtgcgtttgtcctggaacggatcgagaagaatcctgaccagatcgtcacccggggcggtggagccatgcccgtaaccgccgccggaccaccctcccgaggaggacgccccggtattgtcgtgagccatggtattgccgacgatccggttcggctctccatcgaaacacaggacaccgatatacagcgcgttctcgtcatagacgatccgcagctcggtcctttccgacggatcagcgttcggcgtcggctcgaccatgcgaaaagcggacacggccggcgcggcggcccaagcgggatcatccaaacggccgttgatttcgggcccggcggcgacgcggacggcccgaatcccgtcggcggccgaaagggagacggcgaaggacaggacggcgaggaaaagggagacggctcggggcgctccgtatttatggccgtttcgcgttgtcaacgtcatgaggatataaagacggttatgataaccgcatcgaggaaagaccgcaaggggattgttgggcggcccccaagagatattgacatgccggccggacccgaatattctttattcttttttcccagcccctgatcgaacgggcgccgaggagagcacgtgaacgaagccggacggcggaaaatccgcgacccgcgggggacgccgttcccggaaaaacgcttggccgcttcctcggacgggaaaacgaaacggctggccgcccttctctccttgggatacctcgtcctcgcggccgcgattctttacgtgggacgcgcgtcctacctcctttatttaaaaaaactcgaaatcaaagtccaagacgagctggtttcgatcgccgacctgaagaccgagcaattggcccgatggcgggcggaacgcctggccgacgcgtttttcctggacgaaaacgtctttatctcggtcctggccggacgagtgctcaaaacgcccgacgacgatcgttcccgccggcagctcgccgcttgggtggaaaaattcgaggccagcggcatctatgaccggatccagctcctcgaccgcgagggagcggcttttctctcggtcccggccggccttcccggcgtctcggccgccgtcaaacggcggctcccggacatttttttctcgggaaagcccgagatcgtcgattttttcatggacgaatccgaaggccggccgttcctcagcctcctgattccgattttcaagaacggcatccgtccggacgtcgaaagcgtgctcgctctccgcctggatccgaggatgtacctctatccctacctcgcccgccggtcctcgtccagccgaacggccgaaactcatctcgtccgccgggacggcgacgatgcggttttcctcgacgaggaccgcttccggcaaaacaacccctttcccgtcagaattcccctccgggacaatacgattttcggacaggccgtcgaggggcgggagggcctcatccggggaatcgacgaccgccggaatccggtgattgcctgcctccgccgcgttcccggctctccctggttcctggtcgcccaaatcgacaccgatgagctctacgccccggcccggaaacggttcctgggacaaatggcggtcatcatctccattctgaccgccgtcgggctggccgcggcgatgattccccggcggcagaagatgcgcttcctccgggagcgcctggccgccgcccggtctctccacgagctgtcctcgcgccaggaagccctgatcgcctctcttcccgagatcatcatcgaaattgatccggcgaaggtctgcttctgggccaacatgccgggcctggacttcttcggggaagacgtgatcggcaagaacatcggccggtattacgcaagcgatgaggacctgcagacgaaaatgtcccccctcttcgagggctctggcgaggcggttcacatcgagggccgtcatcgccgccgggacggggagatccggcttctcggctggtggtgccgggggatcaaggatcccgagggccgggtgaccgccgtcctttgctccggccgggacatcaccgaggaacggcgggacgcggaagaccggcgggaaagcgaagcccgctaccggacgctggtcgacaacgccccggcggcggtcttcgtcgtccgcgaagaccgggtcgtcctggtgaacgccgcctgcacgcggctgtttggagccgccgctccggacctgctgctggacagatccccttacgacctgatccaccctgatcaccgggaggcctttcgtgaacggatccgccgcctccgcgacgcgggagaggttttcccgacgctcgagaaaaagatcgtccgcctggacggctccacgcgcgacgttgaagtcacggccgttcccttccccgaccgcggcgtcatggccgtccacgtggtcctgtccgacatcaccgagcgcaagcgggtcgaagccgagcgggaaaccgctttggcggccgtgaaggaaaatcagtcgattttcgaccagttcatgaaaaacagcccggtgtacatgttcttcaaggacgagaacatccgggccctcagcttgagcgcgaattattcaatcatgctcggcatgcccgtcaccgcggcgctcggcaagaccatgtccgagcttttcccgtccgacttggcccgaaacatggtcgccgacgaccagcggatcctgcgggaaggccggacgatcaccgttgacgaggaattgaacgggcggcattacacgacgatcaagtttccgatccatatcgaaggcaagccccggtatctggccggattcactctcgatatcaccgagcggaagctggccgaggaccggatcaaggcggccaacgaagccctgctcgtctctctgcgggaaaaggagctcctcctccaagaggtccaccaccgggtcaagaacaacatgcagatcatctccagcctgttcaacctggaatccgagcacgcgtcttcggaaacccgcgagatcctcaagcggggacaggcgcgcatccggtcgatgagcctgatccacgagaagctctaccggtcggtcgatctttcaaaaatcgacctgtccggatacctcgagagcctgtccacccacctgttccagatctacgtggtcgatccccgccagatccgcctggagacggatatcgccgaagttcggctggacatcaactcggccattcccttcggcctgatcatcaacgagctgatttccaacgccttgaaacacgccttcccgggcggccgaaagggcgtcattcagatccggctcgcccgggccgccggagatacggtgatcctgcaggtgtcggatgacggcgtcgggctgccggagggcttcgaccggagcaactccgccggcttcggatttcagatcatcaacctgctcgtcgaacagctggacgccgtcttggacgtcgaccgcaacgacgggacgaccttcaccttgaagttcaaggagctgagatacccgtcccggccctgagcccggctcaaatcttcaggtggctgattttgcccgcggcgaccacacccaatcccagccgctcggcatagcgcaggtactcggtgaaccgcggattctcgttgaccgccacgcccatttctttccgcttggccgccaggaggttgtggcagaccatgtccagggcgaaggggtccgtggccaggtaaatccggttgtcgatatacgtgaatttggcgttcggccccgggccgccgtcgtactggcacaagagcccgtcggtgacattgaggaccatcttgtcccggacgtcggggaatgccaggacctcgacacagacgtcaaggaacagcggggcatggaggcggttggtgttgcagaccgccccgtagccgatgttcttggtggccatcgaagccgcgttgccggtgttcttgaaaaccgggaggttgatgatcttggtcagtctcttggtcagaagcttcccgaagtaagaatatttgccgttgaagacatgctgattgagatagccgaggtccttgggaccgtcgacatcggcccaataataccggtcgagatcgaaattcgggacgctgacgtgggtgccgtcgggcttcaaccacttgctgttgtccgccgtcgttccctcctgggcctgctcgtccatcgtctgaagcccctcgatcgacatcccgggaaaccgaccggccgtgaagccggcgtcggtcagcatgaaatcgaaccggtcccagatgacgatgtttttccgggtgatgccgccggcctcgagccaggcggcgacggcatcaaccagctccagccgggtgctgatcaagcccgccccgaccggattgaccttgagaccgacgatgtcgtccttggaaaaaaagagttcaaagctttcggccggattttttccggtcagggcggcgagcccgttctcgaacatggcccggacggccgccggatcgggtttccccgccggcatcgccgccggatcgtgaacctcaaccacccggccggggcggagtcccggaagggagaacttggttcggggaattttcagggcatcctcgatgttggttttcggccgggaaggcggcgtcttgacggccgaagccgcttgacctgattcgtgggcgaagagatatcggcttcccagcccggacgaggcgaccgccgcggccgcggccgcgacggccgcgccgcgcttgaggaaatcgcggcgctcgattacattttcagagggcatcgaacggtaagcacacgaacgcttcatggctcctcctcggccggcgggaaagcggccggcgtccccgggacattcccgggaacgccggtccggcggatcagttttcgagccggtcgaagacgctcttgatgcgggcgaacgcccagtcgagatccttcgtgccgatgatcaggggcggggcgaaacggatgacgttgtcgtgggtttccttgcagaggagcccgtcggcggccagggcctcgcagtaccggcgggcgccgccggcctcggggaaaagctccacgccgatcaaaaggcccttgccccggacttccttgatgtttttgctcttgatcgtccgcagcttggccatgaaatacttgcccatcttgaccgcgttggcgacgagcttctcctccttgatcaccctgagggattcgcgggcgacggcgcaggccagggggttgccgccgaacgtcgagccgtgggtgccgggcgtatagacgctcatgatggccgcgctcgtcaggcaggcggagatcggataacatccgccgccgagggatttgccgatgacgatcatgtcgggcttggccttttcatgctcccaagcgaacagcttgcccgtccggcccaggccggtctggatctcgtcggcgatgaacaggacgttgttctttgtgcaaatttcccgggcggccttgaaatatccgtccggggggatcaggatgccggcctcggcctggatgggctcgacgaggaaggcggcggtgcggggcgtgatcgccttttcgagggcggccgcgtcgccgaaaggaatgacggtaaagcccggggtgaagggtccgaaattcttccggtaaagtggctcggtcgagaagctgatgaccgtgaccgtccggccgtggaagttattggcgcagacgatgatctcggccttgtcctcggggatgcctttcttctcatagccccacttccgggcggtcttgaccgccgtctcgacagcctcggccccggaattcatcggcagaaccatgtcgtagccggccatccggcacagttcctgggccaacagcggccactggtcgttgcggaaagcccgggaggtcaggctcagctcgcgggcttgggcgaccaaggcccttatgatgcgggggtggttgtggccgtggttgacggctgagtaggcgctgaggaaatcgagatatttgcggccgtccacatcccaaacccagatgcccttggccttgtcgatgacgacgtcaaggggatggtaattgtgggcgccgtacttgtcttcgacggcgatgtactgttttgtgttcacgtgaaactcctttggcccgctcggcggcggacattgaattcagaagaccgaaacggcttcaaattattgttgcttttcgatagaacgttcatcggttctcgtcatgatccttaaaaccgggccgcctcccaagactcaatcatcaattctctactcctccggctgccttcttgcatgtacctaccctccttcctcccctatgactcggggaggacgtcaggcaggcgttcctcctatatgaacctacccatcctgccttccctatgactagggaaggactgcaggtagacgctcctcctgcaggaacggagagggcgggattcgaacccgcggtacaccttgcggcgcacacgcgctttccaagcgcgctccttcagccactcggacacctctccggaaaaaacgcgattaagaagaaataaaataccagaaatgccccctcaaggtcaatttgcgggccatctaagccggaactgtagatctccgccggaaaatacatttcatccgactcttaattggaacctggttatccatttcccgatttgaaatccaaacctggtttaccatttccttattcccaaccggtgagattcggcgtcccgagagccgcaaacgtccgtcctgcttatatttatatgagggagtcgtggacattaaagattcggggggaataaacaaggaaacggttaaacaggtaccgatatcccgacaccgagggcgcggtcccgtcctccctatcggtcgcgataaatgttgatgagatccttcaagaccgcggccgccgtgccgcgcggatcggacttcccgtccgtgacggcgatcgatcccatcgtatccgtccggaaaacgatccccttgttcgtcccggtcagccggaaaagcggatgcgatgagggaacggcctgaaccttgacatcggctttgaaacgaccgccctcctcgtaaaggcgtcccaacagcttgagggcattcccttcggcccgggcggcggccaagtccttggccgcgacagcccgaatcccctccacctcgagatcgtccagaacaaactccgtccccgccgaggcgttggccaggaggaggaccttgcaggcggtatcccagccgtcgatatccatcgacggatcggtctcggcgattccccgggcccgggcgtccttgagggcttcctcgaaggaaagcccttgctccagccggctcaggatatagttggttgtccctgttaaaacaccttcgaaacccaggattttcgccccggccagggaaatcgtcgcgacatcgagcgtcgggagggcggcggccgtcgctccgctgaacttgagggaaagttttttcgcccgggctttggcttggagattcttaaaatcgacgaccagcgcgcccttgctggccgcgacgacatgccagcccaggttgaaggcggcatggatgaactcgagttgcggctcccccgtcctccaattggaggacgtacactctacaagaacccccgttcgccgcgggcgtatcaaaacctcggaaaaggacatcccgggaaaccagccggggaaggattcgagcggcgccggagacggatcggccagatagaaaaattcaccttccttgttcgccacccaggcgccggcctttcgaacgatcgcgatcaggtcgaaatccaacccatagcgggcccggcaatcctcgtgtttctcggccagcaggcggacgaaagccttgccgacgtttccgtatccggtcaggatcagcgggatggacatgaagtcatctcctggggcggggacatgcattcccccgtcgttcggatttattcgtatttatcccgggcattataaaacgaaaccgcatccaagaccattttccagaaaagggataatggaaaaaccggaatgctcttaagaccgggccgccttccaagactcgatcatcaattctctgctcctccgtcctcctctaagactagagaaggacggccggacggcggccctcctttatgaacctgcccatcccgccttccctatgactagggaaggactgccggtagacgctcctcctgcggggtcttaagaccggagcgtctttaagatcctttgtatccgtatctgcccatcctgccttccctatgactagggaaggactgcaggtagacgctcctcctgcggagtcttaagaccggagcgtctttaagaccctttgtatccgtatctacccatcctgccttccctatgactagggaaggactgcaggtagacgctcctcctgcgggaacggagagggcgggattcgaacccgcggtaccctcacgggcacaccgcttttcgagagcggcaccttcaaccactcggtcacctctccgcaagaagcgactcattatagcggatatgggcgaaaacgccaaaatgaaatcaagatcaagtccggaatccgatgccgttaaattcggaaacaattaaacagacgccggtatcaaattcctgaaaatcgggaaatggataaacaggtaccgattgaaatacggaaaaggataaccaggttcggatttgaattgggaaatggttaaacaggttcgggtttgcgggcggggccgttcttgcggcgggcgcggaagaaatccctcaagacggcggcgctctcttcctcccccacgccgccccggacatcgagcttgtgattcgttttgcggatgggaaaacggataatggacttcaccgccccggccttgggatcggccgcgccgtagaccagccgggcgagccgggcctggaggatcgccccgaggcacatcgcgcacggctcgacggtcacgtagatttcacaccccgtcaaccggtaattgcccgtcttccgggccgccgcccggatcgcgacgatttcggcgtgggccgtcggatcgccgctccggatcggcttgttccctccccgggccaccgccctcccctcgcggacgatcaccgccccgaccggaacctcgcccttggccgcggccctccgcgcttcccgaagcgcttcccccatccaccgggcgtcttgtccgctaaggctaattttcgtttccatctgaggccgaaatattataaggtattccttcgccgtccgtaagaggcaacgatcatgagcctggatgcgttcatctgcccgatctgccgccggccctatccggccgacgtccgaagcctgttttgccgcgcctgcggcgatccccttctctcggcctttgtcccgaaatcgccggcgatccgccgcggccggccgatgggcgtcgcccgctacctcggctttcttcctcttccggaattcgatccggatctctcgttgggagaaggagggacccccctcttccctctcaaccgtctccggtccgctttccggacgccgccgctctgggtcaagaacgaggcggtgaatcccaccgggagcttcaaagaccgcggctcgatcgtcgccatccatatggccaaggccctcggcttcgagacggtcgggacgatttcaacgggcaacatggccggctcgacggccgcctacgcggccaaggccggcttgcggacggtcgtcttcatcaaggacgacacgcccctggaaaaaatcctgtccgccgggatgcatggagccaacgtcatccgggtccgcggcaattacgcccgccttttcgtgaaaagcttcgagatcggccgggtcttgagcttctacttcatcaactccgtcgatccgtatcgcatcgaaggatacaaggtcacgtccttcgaaatttatgagcagatgggcggcaaagcccccgattttcttttcgttccggtcagctccggcgggcacctcatcggtctcctccgcggctttctggacctgaagcgggccggccgaatccgccgccttccgcgaatcgtcggcgtccaggcccggggctgcgcccccatcgcccgggccttcgcccggggccgggcggccatcgttcccgtccgcaagccccaaacgatcgcccacgccatcgccaacccgcagccgcccgcgggaagagtcgtcctcaagctcctggccgcccacggcggggcgatggaagccgtcggcgaaaccgagattctccgggcccagcgcctgctcgccgaggacgagggactcctcagcgatccggcctcggccacggtcctggccgcttttttgagaatgtccaaggagggccggatcccggccgacgccgcttcggtgctcgtcctcaccggatccgggctgaaaaccctcggcgacgtggaccaaagccggctccgaatcgccgaggccgacctgtccgaccttccccagctgatggccgcctggaaatagcccgcccggctcgattcgggattccgcgttcactttcgccgtcgttttccgtatgatggaagacggcgaaaggaaaggaggagaggcgcatgaccaaccagaatccatttcagggatgggaggggcaaatgcccaagcttcccaaaatccctcggaagctgattttttacgtcctcggcggaatcatcctcgcgattctcctggccggatcgttctaccaggtcgacccggatgaaatgggagtgatcctgaggttcggcaagttcgtccggacgaccgatccggggcttcacttcaagctgcccttgggcatcgaagccctgaccaaggtcccggtccagcggcagctgaagctggagttcggattccggtcggccggcggcggcggggctcgaacccaatacatcgccccggccgatgtcgaagccgaggcgatcatgctgaccggcgacttgaatgtcgtcgtcgccgagtggatcgtccaatacaagatcaaggatccctataagttcctgttcaagatgcgggacaccgagcaaacgttccgggacatgaacgaagccgtcgtccgccgggtcatcggcgacaacgccgtcgacgagacgatcacgacgggccgggcccggatcgcggccgaggcgaaagaagatctccagaagctctgcgatctgtatgaaatcgggatcgacgtcaaccagctgatcttccaggacgtcaatccgcccaacccggtcaagccggccttcaacgacgtcaacgaagccctccaggagaaggagaggaagatcaacgaggcctgggccgagtacaaccaggaaatccccaaggcctcgggcgaggccgaacaagccgtccgggccgccgagggctatgcctccgagcgggtcaacaatgcccagggcgacgccagccgcttcgtctcgatctaccgtgaatacgccaaggccccggccgtcacccgcaagcgcctctacctggagaccatgaccgagatcatgtccaagatcaaccgcaaggtcatcgccgacgacaaaatgaaaaatctcctgcctcttctcaacttgtccgaggaggtgaagaaatgagccccaagatgaaacggaccacgctcgttctttatctcgccgccgccttgattctcctggccctactcggcggcgccgtctacatcgtgagcgaaaccaaccaggtcgtcatcacccaattcggcgagccggtcggcggaacgatcatccgccccggccttcacctcaagatccccttcatccagaaggccaactatttcgagaaacgctggatctcctggaacggcgatcccaaccagatcccgaccagggacaagaaatacatctgggtcgacacgtactgccggtggcggatcgccgatccgctcgtcttcttccagcgggtcgacaacgagcggaacgcccggtcgcggctggatgatatcgtcgacggcgaaacgcgaaacaccatcgccaagttcgatttgatcgagatcgtccggtcgtccaaccgggccttcgagatctccgaggacgccgccgtcctcgatgcgtccgaagccatctccaagatcgaggccggccgggacaagctggcggcgatcatcttggaaaacgcctcgaaaatcaccccccagttcggcgtcgatctcaaggacgtccgcatcaagcgggtcaattacgtcgacgaggtccagcggaaggtcttcgaccggatgatcgccgagcgccggaggatcgccgcgatgtaccggtccgagggcgacggcaagagcgccgagatccgcggccagaaggagcgggagctgaagcgcatccagtcggaagcctacaagacggcccaggagatcaagggcaaggccgacgccgaggcgacccgcatctacgccgcggcctacaacctcgatcccgagctctaccagttcatgaaatcgctcgacacctaccgggccgggctgatcaaggacacctggctgatcttgacgaccgacagcgagctcctgaaatatctcaagaatcccggcaagtgaacggaggctgaacatgaaaacgaaattcgccttgtttctcgcggtcttccttgttttatccctggcaagctgcgcgacgctgttcaagggaacgaccgaggaagtgaatttcggctccaatcccacgggggccgaagtctgggtggacgggaaattgatggggaccacgccgatcaatttccgcctgatcaccaagaaagtctacctgatcgagttcaagtatcaggaccagaccaagtcggtttatctgaacaaccacgtcggcgcggggtggattgttttagacgtcctcggcggcttggtcccggtcatcatcgacgcggtcaccggggcctggtattccttcgaccagagcaacgtcaacgtggatttccgggcgccgggggcattcgagccggccgtcctgtaaaggaggcacgcggaggggacgccccctccgtcctcctcagtcgagggcgtcgatcagcttgtgcttattggggaaaagggccggcgtcccgcccgtatggaaaaagacgatcttatcggtcttcttgaaacagcccttcttgaccaggtcgagcatcccgatgaacgccttggccgtatagacgggatccaggacgacgccttccgtccggaacaggcgccggatggccccggtcacctcccggttcacgatgccgtagccgtcggtaaggtattcgtctaaaacgatgtaatcttccggccgcggtcccgtctccatctgaagcgtccgctggaccgcctcggcgaccgtccgaacgatttccgtgaaggaatccgccgagtcagacaccgagatgccgacgacccgggtttcgggcgaggcccagcgggccccgcaaagaagcccggcctgcgtcccgcccgagccggttgagtggacgacggcattcggccggaagccctggctttccgcctggtccagcatctcgaggaacgcgccgatataggagatcgcccccagcggccggtccatgccgcccagaggcaccgatcccccgttggagacaagatagggatttttcccggccgaccggaactccgccgcgacttcctcggcggccgccaccgcgatttcctgggtgacgagctttccccggaccgcctcttggaaccggatctccgcgccgaggagacggtcgaggagaatgttcccgtcggcttcttccggtaaatcgtaggatttgaacagaaccaaaaccggatgaaggccgcttttagccgcggccgcggccgcctgcatggcccagttggactgggtcgccccccaggtgaccagcacgtcggcctttttggccagggcgtcggggatgatgtactcgagcttgcgggatttatttccaccgaaggccaggcccgtcaggtcgtccctcttgatccagatctccggcccgcccagctcggccgacagccgctcgagcttccgtatcggcgtgggaagatgaatgaggggaaggcgcggaagcgcggccagctttccgcgaagcgttttctcagtaggattcatggcggtcctttcgacgagatattgtcccgccgcggcggcggaaattcatcttagccgcaacgggccggcttttcaagacggacggctccggatccggctccaccaggccgccgcccatcgccgcaggtgatcgacttggacatagacgatgggaacgacgatcaggagaaacaaggcggacgtcaccaggccgccggcggtgcagagggccagggacgaccagatccgcattttccccgattcgaccggcaggaggagcatcggcaggattccaaacacggtcgtgccggtcgtcataaggatcggccggatccgctcccgggcgccctcgacggccgcctcgatcaagggacgcccccgcttccgtttcaagttgatgtgatcgacgagcaggatggcgttgttgacgacgatgccggccaggagaatgacgccgatatacgccgaggaatcgaaggtcgcgccggccaggatgaacgcaaggaaaacgccgatcaagcccagcgggacggccagcatgatgatgaacggctgcgtcagggattcaaagagggcggcgatgatcatgaagatcacgagcagcgagatcacggccgcctggaggatttgggatcgttcttggacggtcatgagccggtcgtcgtcaagagaggcgctgaacccggccgggagatgaagaccggcgaacaaactcgtccggaagcgctcgccggccttcaccggcccgcggaattcccaggaaacggtttgctggaagcgccggttatcgcggtcgatcgatccggccgacggccgttcgatcaagtcggccacctcgccgaggcggagatattccccccctcttgttcgaatcaaggcgtccttcaccccgcggaggtcgaggatgtcggcgtcgggaaatttcacggccgcggccatttcttttccctccgtccggatgaccaggggcgccccgaaccggccctggagcaaggtctgaagatatccgtagaagaagcgggggtccacgtcgtaggcccgcaaccgctccggatcgattttcaggatgttctcgatcgaactcccccttccccaccaaccgtgcctgttcgaggtgatcatgacttcttggatccggggattcagccgcagggttttttccacctcggcggtgatttccttgagcttcttcagattgtatccgaagaaccggattttcgagtcgaggaacgatcccggtcccatgctggagccgtacatctggggatcgaatccgtaaacatagacgtccaggccggcgaattgggaggccgtccggatcagctcctctttcatccggtacggaatcgcggagcgttcgatcgccggcggaaaagaaacgcgaagcgtggcgctcgtgggactgacctggacgttcatttccttggcgcacgcctgggccaggacgaaatcctcgaacggcttgatcgccgcgtccgtccgctcgatgtccgtccccggcggcaggccgaggtaaacaaagagatattgccgggaggtgaaggaaaaccactcccccgtccggacctcggccttgaaccaccggtaggaaccgatgaaaacgacggccgcgacgagcatcacctcgaccggatggcggagacaggcgcgcaggaaccgcccgaagatcccctccggccgccgggcggtctcctcccggcgccgtttcaacaagcgcgggctcaaggccgggatcagggtgaaggagaccagcagggaggcggccagggccgagccgatgacgaaggccagcggcaggtaatagatcttgagcctcccctggaaaaacgggaagctgaaaaacacggcgatcgtcgtcaaggtggatgacaggacggcggtgaagacctcccgcggcccccggacggccgcctcccgcgggggaaggccgttttcccgcaggcggaggatgttctcaaagacgacgatggaattgtcgacgaacatgccgaagcccagggccagcgccccgagggtcagcatgttgagggaaatcccgaaggcggcgatgaggttgaaggtgatgacgacggaaaaggcgatcgacgccaggatgagaagcgacggtccgatccgccggaggatgaggaagatcatcaggaagacgacgatggtgatcaagccggctaatcggtagagatcgccgaggctttttttgatgtcccggctctcgtcgtccacgacctgaaaaacgaggtccggaggcaggtccttccggatgagggcgagcttggccttgacatccctggccacccgcatcgtgttcgtccccttttccttgtggacggtgaagctcacggtcggccggccgttgatccggtggatggaatccacatccgcccaggtcgtgtcgaccgcggccacgtcgcggacgcggaggacgttaccgccggcggagccgacgatcgtctcggccagatcgttcttgtcccggatttggtcgccgtatttgaacaggagctcgcggttttcgtcccgcacccggccggagggataaatccccagccggccggagacggcccggatgatctcgtacggttgaagaccgtaggcatccagcttggctctgtccggaacgatccggaattccggatcggatcccccggtcaggacgacccgggagacgccccggacggaaccgaggccgaacgtgatcctatccttgatcaacccgcggagctcctggagggaggcggtccccgaaaccgtgtaccggaggaagggattcacccggaaatcctcgggaacgaacggcgtgaccgccggccggagcccgggcggaagcaccggccgaagcttggagagctcctcgcgcagggccagctggacgaattccatgtcggccttggaatcgaaatcgacgacgacgcgggacatcccggtctccgaggacgaggagatgccccggacggccttgaccgcggaggcggcttcctcgaggggggccgtcacccgcgtctgcacgacctcgggcgaaacgccgggccaggagaccgaaatcgtgacctggggataatcctccttcggctccagctcgagcggcgtttgaagataggaatagacccccaggatgagaagggcgcaaaaagccatcgccgtcgcgacgggacgatcgatgaggaatttcacgcggctccccggttccctttccgttccttccgggcctcgaccgcttcatacaggacggggatgaggatcagcgtcaaaaacgtcgaaaccgtcaaccccccgatcaccgtgatcgccagcggccgcatcatctcggccccggcttccaggccgagggccatggggacgaggccgaagagcgtgctcaaggtggacatcaggatgggccgcagccgggtccggctggactcgacgaccgcctcccgcaatcccgtcccctcccggcgaagctgccgggtataatcgatcttgacgatggcgttgtcgacgaccagtccgaccaggacgaccatcccgatgaccgagatgacgttgatcgtctggcccgcggcccacagggcgaacaaggccccggccgcgcccatcgggatcgtgatcatgatgaggaagggatggagaaacgactcgaattgggcggccatgatcatataggtcaaaaggacggccaggccgagggcgaacagaaggctccggaaggaccgggacatttcctcgcgctcgccgctgaagacgacgcggtatccggaaggcagatcgagggccccgatttcccgctcgatgttcgggatgacctcgctgatcttggcgtttttcaagccggcggtcactaggacctccctctgctggttctcccgccggatttccctcgggccccggacgatctcataatcgacgagctcgcggagcggaatgagcttccgctcgtggggatacggctcggccagaagcgcctcgatgttgcggcgggcggccccttcggcccggacgcggacatcgaatttcttttccatttcattgtactgggtggcgatccggccgttgaccgcgtcgaccaaaaaaccgccgagatcggccggcgagaagccggcgtacttgcggagggcgtccttgcggaccgacatcctgaactcgggcttgccctcgccgaggttggtgttcacgtcggccagcccgggaatcgcctgaaggcgggcggtcaaaattccggcgatcgttttcagccggtcgaggtcgtttcccttgatccgaaggccgatctcggccgtccccagggccaggaattctccgaggagcgactgatccttggccacgcgatagctgaggtcggggtattggaccatgatcccgcggagagtttcgaggactccttcgagacgcccgggcgcgtctatctcgacatggatccgggctgaattcatcgaaacgtccgggtcggcggcctccagcccggaaacgatgccgatctgcgacatcaccgaagcgacggccggctcccggcccaaccgggtttcgatcattccggccatggccgcggtctgctcgagcgaataatcgaccggcgttttcaggacgatctcgaaagccttggtctggagcgggggcatcagctcccggcgaagggttgatccaaggaggaaagccgctccaaagaggagcagcgtcgcggccaaggtccggaccttgtgatcgaggcaccagaccagggcccgatcgttgaaccggcaaaatcgtccgtaggcggcgttgaatccgccgaaaacggcccggagaaccggccggaagggaaggccgagaaaatgaacggcaggtttaagaagccggccggcgaatgtcgccaagccgttcaagacaaaaccgatccccttgaagaccgcgtacagcaaccaccgcaaggcccgcagcggccaaagaaccgcgtttcgccgattccttccccggacgggcggcagcccccaccgccaggaccaggggcgtccctccccggcctcggccggggtgaaccgccgggactggagcatcccgatcaaggtcaaggaaacgagaagcgacgcgctcaaggcgtacgtgacggtcaaggcggtgtccttgaacaactgaccggccggcccgcgcacgtaaacgacgggcagaaagacgaccattgtcgtcagggcggtcgagacgatcgccccgccgacctccgccgttccggtcaccgccgcctccttgaggcccttgcccagggtccggtggcggaagatgttttccgaaacgacgaccgcgcagtcgtcgagcatgcccacccccaaggccaggccgccgagcgacatcagattgagggtgaggccgctgaaatacatcaggctgaacgtcccgataaccgagatcgggataacggtgtcgatgatgagcggcgttttccattcctgaaggaacaaaaagagaatgagaaaagccagcagggcgccctggatgatttcattcttgaccgccccgatcgccgtttcgatgaagccggcctgctcggcagcgacctggattccgatcccggggttttccttccggatctcccgcaagaccttccgggcggctttcgtcgctttgaccgtgttggccccggcttccttccgaacctggaggccgatgctctcctccccgttccaccgggtgatcccgtgccgttccttgaggacgtcccggacggcggccacgtctccgagacggatgaccccgccgcttttcgtgatccggaggctgatgccggcgatttcagcgatcgtttcgaattcaccgaccacccggagcgtatatttaaaggctcccttccggatcatcccgccttgcaggtttcggttgaaagcgtcgatccggccggcgatctcctcgatcgtcagcccgtacagggcgagcttcgcggggtcgacttcgaccgcgatttcccgctcgacgcctcccgtgacttcggccgaaccgatcccctcgacctgttcgagccggggtttgatcaagtcctcggcgatctccttgagctcgagaagggcgcgatctccggtcagaaccagggtcatgatcggcttgctctggggatcgagggtgacgatccggggatcctcgacgccctcgggaagtccgtcgcgggccgcgtccagctgttcccggacatggagcatcgcgaaatccatgttcgtgccccaatcgaactcgaggctgagatgggagatcccctccttggagacggattcaacccggcggaggccggggacccggctgacggccgattccagggcggccgtcaccagggtttccatctcctcgggggccgctccgccgtaagcggtcacgacggccagccggggatagcggatgtccggcaggaggtcgacgctcagctcccggagggagacgaatcccaagagaatgacgcccaggaaaaacatcgacaccgtcaccggacgttcgacggcgaagcgggcgagcttcatgagggattccgttccccgcccgccgccggcgaggcgcccgtgatccggtcgaggcgggccagggcgatcttgtattcgatgacggcctggatttcagcggacttggcgttggccagctcccgccggtaattgaacagccattcgcttccgacgagcccttgctggtaccgctgcgtctcggaggcgacccgtttttccgtcagctcccggtaccgggcggaggaggcgatcatccgggctttcgcctccaattcccggatgacgtcccggacttcgaattcgatgtcgttcttttccttttcgagccggagctcgttttgctcgccggccgcccgcgcccgggccagcccggtccgcgaaagaaaagaagcgatcggcacctccagcgtcaacgtcacgctccaattcggatatttccccttgaggatgtcggagaaggattcgccccggccgccggcgatccggccgatcacgacgccgctcaacggattgtcgtcctggtagacgtaccggacgccggagatgccgggactccagaaggaaaaattgaggtcgaccttgggcagggactgattccggaaatagtcgacatcgctccggctgttatcgatccggcgccgcgcgatgtccatttccggccggttcgccagggctgcccgcaggacgtccgcggccgaaacctcccggatctcgatctccggccgatccagggggatgatccccgcttcccctccggccggaagacgcaggagctttctcaagaggtcttcctggctttgaacggcccgggaagccgcgagaacggcatcctcatagcgggcgacctcggtttcggcgttgaggaccccgattcccgattccgttccgatccgggccgcttcccggttccggtccaggatctgccggctcgacgccagcgacgattcctgaaccttgagattttcccgggccaggaccaggttccagtaagccgcctcgacttcgaaggccgtctgagcggccgccgcccggacggaggcgtcggccatctccacggcccgggcggccttgatcccctcgacgttcgccgccttggatccgaatccccgcagcagcggctgcctcacgtcgagccggacgctgctgaaatacgagggattgatgagagaaaaggatcgcgtcgtgtcggtcatggcgctcgagacgccgaggctcagggacgttccccaggggaacgactggaccaggccgaggttcacggaatcgaacgagctggcgatgtccgacccttccacgccccatgttccgggggtgttcgtgtcgccgttttgataggtcagctcgaattgcggcaggtacctctcccggacctccttgagggcgagcgcgtccatggccgggttcaacctctcgatggataaagcgaggttctcccggagggccgtgtcgaggcattgccggagggtcaagctcaatgtccgttcctccggaacccgccgcccgggcgcagcgggagcgatgaccgaggccaggagaagcaaaccggcggccgcgagccgcgaacggacgggcgtggaaccgatgatgttgaagcgcgtcatgggggtttcccttcgtttgaaagcgggtctaccggacgacgactctcgagtcatgggccagggtgaaatggccctcgacgatgaccgtgtctccttcggaaattcccgaagccgcgtcgttcccgggaaggatttcggcgtcgtgctcgttttccaggccgatctcgacgtatcgccacttggccaaaccctgttccacgacgaacaccagtttccggccgccccggacgagaatggcgtcctgcgggacgaggaggcggttccgatggatttcggccgcgatctcgacctcggcgtgcatcccgggcttgatctcgtctcccgacccctccacggcgatgaacaccggacacgttttgtcctcggcatcgacgatcggaccgacggattcgaccaggcccttgaacacccggcccgggtaagcgctgaaccggagatcgacgccgcgcccgggcatcatttttccgatgtcgctctccagcaccctggccttgaccttcatccggctgagatccacgatcgtgcagatctcccggccgctttcgattcgttcccccggggaaaccttgaagtcggtcaggattccggaaaagggcgcccggatcacggttttttcgaggatcagccgggcggttttgacgtcgatttcggcgccggtcagcccctttgtcgtggcgatgatttcctctttcttccggccggcggcgatgagagccagctcatagtccctgcttgctttttccaagtcggcggcggtgatttttcccgcttggaacgcggccagggccgcctcatgatccgcttgagccttcgtcaggccggcctgtgcctccggagaggcttcatcatcggccgcggcgaactgcttttccaggtgaagctccgaaagatatttcagccgcaaggcttcgagcttatccaggctcagacggtattcggcatcgtcgatctcggctaagacgtcgcctttccggacgcgcaagccctcccgggcgggaaggctcttgatcacccccccggcttccgccttcaagacggctttcctctcggtataggcttcgccgggggatttgagcgtgatgatcaaatcgcggcgcagcgcggtcacggctttgacgggaagaggcgccggttcggccgaagttttaggcgatcccgaaacagccggcgcgaggccggaaaccccctccgcgtcctcccagtttccggatccggacggcggttttctcaggaaaagaacgtatcccccggcgatcaaaacgaccaggacaagcacgatcccccacgctgttttcaaacgccgcatctccgccccctttgtcgtcggccgagctagagcaacccgtcgccccggcttcaagaaaacgagtctctcaagctgctattcgactggaaattcttttgcttaaccctcattctcagcattgttttcatatcacggcacatcgggaaaagcaacggctccatggaatgaaagacgctcgctcggagcgtcttgtctcacttaggctgaccttcgaacctcgtccggggaatcatgggcggcgatcacgacacatccatggccggatgcccgaaaatcggtttcatttcttgatgagcttatagatattgatcgcggtctcatccgcttcctcgtcaagatccggatttccattttgatagcaatacaaccggccgtcccgttcggcaagcagcaggtcatccatataaacgatctcctccggagagccgtctttttccaaatcatagagaaggagcgcaaacctgcccgggctctcccggcacgttctcatctgaataagaaggaaattattttcataaaggaccgctttcgtgatcgccgaataggacttcgcccacgtgtccaagtctaataaatacgcgcttaaactcccttgataatttttcaacgcatagaagtcccttggcagggatttatagaaatccggaaccttcagctcgagcgtcttttccacgccgagagttttctgagatatgaagagaatcctcggctcgctttgtttgatatagagaacgtcattcccataagggataagaaaccgctcgatctcgtatcgacgatcgaacttgatgccgcgctcgagaatgatgctcctccccggcgatgatgaatcttcctcaatggcatgcagattggcgatgtccaccttctccgcggagaccggaccgttcagcattttcaccccggcaaggaaaaatcgaccgtttacgaatagcgccgtcttcaaaagaaacaggaacgggtccctcttcagccaaatcgttttttccccatgatatgtcttgcccgtccggcgaaatattttgatcttgtttacgtcctcaaacagagccaagtctccccggtattcgcataccgtaaagacctgcgtcgcttcatccgggctttggccgaagggagcgatcgccgtcgttttgtcttgactcacggccaccggtccgctttttctgaacatcaaaataagatcccccgcggaatccaaaaacgaccccgatatcggtccccaatacatttgctcgtgtttccaatggtcaatcctctccaggcgcgtccccaagacgagtgcagggatcatggccgctgttaagaagacgacgatcaatcgtttcatcggccgccctccttcgaggaaccgcataaggagcccccctcccgtttctctttttgcgatttgatcaacctgcctccgttcattgtaccgcctgtagagtgatgaatcgaggcgttgacctgctcccccttcctcgcccattttgtcagtaacttttcggatatgcaagtccgttgttgatcgcttccggattcaggctgggcggcgcttttcgaacttcctctcgagccgccaactcctcgagaatcgcgtcgccgagcggactatgcggctgttcggcgttgtaatcccggcgacgtaactcgaccctctcgagggtgacttccgagatctccatcttgatctcggccacgggcgttccgccctcatcttgccggagggcgcgaaagggaaatttctttagtctccctagaacctttccaggtcggcacgcgtatcgatatatgacgattgagccggaggaggcgaacatggcgagaatgaatagagcggggttttgcgttgttttgcttcttcttgtgcccgcattatcggcgtccacagggcacgacccgggacaatacaacaaagaggtcgcgccgtacgtcgctttcttgaagactcagaagcgcggtccggttgattacatattggatctgttcgagaagtacgacattgtcatcttgtgcgaaagatttcatcccgaaacgactcaatatgatctcatctataatctaatcaaggacaagaaatttaccgacaaggtcggccacgttttcaccgaaatcggtaccagtacgaacaatgcgtatctacatgatttcatgtccaccgacggcctgagcgacgccgaagcagatcgcaaggtcatgcatctctttcggaacctgttttggatgcccgtttgggaaacgcaaaatttttttgattttttgaaacgtctgtacgcgctcaacagatcactacaggcggatttaaagatcaagatcagcttctctgacatgccgttctcgtgggaaggcatgaaccgggagaaatatgcatcgttctcaaactctctcgttcagcgggatcaggtcatggccgagcagattatcgaggaattcaaagaaatcctcagatcaactcagtcgcgcaagaaggcccttgtcatcatgaactaccgccacgcttttaacgaccgcgtcaagaacgcgaagggcgagaaggcgaataacgcagggcgatacattttcgaggctttccctggaagagtggcaaacgtgatgatcaacagcgtagcccttcttcccggctcagacgacaggaaagcggtcacagcgccgatttgcgacggcaagtgggacgccgcttttaggattgccggcaatcctgatctggggttcgatttcaaggagaacgtcttcggggcggatcatttcgattatttcccgtttttcaagcatgactatacataccacgatgtttttaccggattcgttttcttcggaccgctcgaaaagcacaagatggtttctggaattcccgatcttctccgggatggttatgataaggtcattctggaaagaatggcaatcgcaggttcccccgtcgaggaaagcaaagcagccgagttcatcgctgaaatcgagacgagacatgaaacgagctacgacaatctcccggttttgatggggagaatacgcagctggctgtcacaagctgaagatcattaacggcggcccgatcaataggttatcgctgtggggaagaattccgtcccggaaagaggaggactggtacgaagtgcccggtcttgggccgaccctcctcgtacacgcggcgcaacctctccgcgattgcttgcctccgactccgctcctctcgagaaaaaggccccctccggagtggagggatgcatctatcttgacttcccgttatctcaactttattattttgatatatgagggagggagatatttataaagtcgaattttaacccaacattgcgttgagattgatttttcaagggcgattcatgagaaagagctttttgacgaggggactatacggattgatgtttttcttcggtttcggatgcttgacgtatccccaggatcttcaactcctcaaacagtggaagcacgatgccgattttaacggagaagtctaccggtctctattggacgaacatgataatctcatcttggtccatcgttccgggatatcgatggtcaacgaaaataaattcgtaacttttgcccgatggggccaagggcccaatgagatcaacggcacttacggaatgtgcgaataccatggcgacctggcggtgtttgtccataaaaacaagatcaaactcttccgaaggaataataatcgttacgattatcatagccagaagtggttgaaatccgaccctggctcgtattatctcaaggacgcgtttttcgccgacaaccggtttttcttggggggaataatcatcttggaaaagatgaaaagcgtgcgcaaaggggcgttgctgcggatctataacgacaaaactgaaaaaatagaaggggattattgcgggattcaatatcccgaaccctctcgttatcatgaaatccggaaacacttcgccgtcgacggacgttatgtatatttcctgtcccagcacgaaatgaagctctacgcgatctcattggatcatatcgcctcaacgaaaaccatcgaattgaagcggcccgatttttatgtttccatgcccaaggatttttttctcgtaaaaaactataaagacgatcttgaattctttaaggacatggagagctggtatacatccttttccgcggtcacccgaatggccgtgcttcagggcggatatctggtgattcaagcgcgaacgtgccaaccgcatctaaagaaattcgccctgctcttttacaatatcggaaacggtttttccttggataagattgtttatcaagacggcttgctgctggcggggaaagccgatcttctgtattgcgtccacaagggagatccgatggtcgatgaagaagcgaatcaggttatcatcgacatcttccgggtcgttcaataaaaggaagacaacatgtcaaaggaaagtttatgattgcgcataaacacgatcagcgaatcatctcatcgcggcccccgaaaggcaacccgatgttcgccggggttttctataaaagcagcctcgcggttccaaccttgaaaaggccggattccttgaggtttttaatgaaaattatatagtcgattatattgttgattgttgtttgttgcgcctcttataaagggtgctcccggaatccgtcgatacccatggagattatagaaatcacccctcttctcgagttgaatgccgttattccggattataagatcatgcccttcttcaatttatttcagaatatggccattgatcaacagggcaatatctattacctgaagttcggccatgacaggatccaaaaattcgataagacgggccggctcgcggccgatatcggaggaatcggacaggaggccgacgcctttttctctccaacggcgatactggtggaaaacgattctctatatgtcctgaatgatgcgggccgtcaagtaaagattttcaacctcgacggcgaattcaaatcgtctttcaagattgacaatgcctggccccccacctctctttgcgtcgaccgcgaggccatttacgtgaatgtcattgataaatccaacaaaacgaggaatgacggcaagctcatttccgtctatgaccatgaaggaagactcgtcaagaagatcggcccgattatcaagtgcaattctatgattggatataacacgttcaacaggatacggatgattgcgcgcgacgaaaatatttattacgcctttatcaaccagcccttgatctcctggagcggaaaaaacggcggccggacggccgtcttggatctacggaaattcggaatccccgtcatcgacgcgatcgccgggagaatcgacgcggagggaattgatacgccggaaacgtttaaagatgattccgtttcatctggaacttgcatatctttctgcagtggattcgcggttgatgaagccggaaggattttttatatcccgaatacggccggttccggctcccgtgatgaatgggataattccattttattattcaatgaaaatcataaattatcaaaaaagatatatttgaaaacgggaaaagaaaccgtcactccgagagacttcttgatcgccggcggaaaagcaatctatggaattggaaccattaaagaaaggagcattttatttaaattctaatcgcggcaggattttatggagaatcgcctccggaaaatggggacgcggcgaaacgcgatcgcttggatttttagtctattcctctggctcaccgcttcaggcgcggccatgattgcccatgaggcctgtaaaatcgcggaaaatcgggccgctcatggaaccctggcgcttgagctggaagaggaagccgtcattcgcgaatcgaacgagaacgacgattatcgtttttctttcattagggacctggccgcggatgcggcggaaaatttattcgtcctggataaaaatagtatcctgaagtatgaccgccgcggaattttcttaaaatcattcggccgtaaaggccagggccccggggaattgatggaaccccggagtcttttcgtcgacgaacacgacgatctctttgtcaatgatcaaggcggcttgctgcacgtttttgacaaggagggaacatttcggcatcagatcaaattggatttccaaattccctttgattccaacgccttctacgtaaccggcgaaggtttcatctacgctttttcttgggacatgatcaatctggagatgaaaaagactttcgtgaaagcggattcgagcggggcggtcattcttcgcctgaaaacgatggatgacgcggggtgaagatctcaggaagccaaacgggcggagtcatggggggaatgattcacccctattcggcgaattcctttttttgcccgatcggcaatacgatgttatgttatggagaaaacactcgatatcaattgatactctatgatttcgacggcaacgtgaaatccgtgatggaccgggatgaaaagccccggtccatttcttcaaaagaaaagaaattcttgggcaagaattgcgtctttccttcccatcgcccctttttcaagaagttgatgagtgatgacaaaggccgaatttacgccataagagtgaagtcggtttgggatgaaaacaaggccgaaaaggcggatattttcagccggcacggccgctatctctaccggacggaattccccgcgacgccttcgctcatcaaaaacgattccgtgtatttcattgacgaaggccaggacgggctgaaggtcatcaagcgcgtgaaaataaggaattatctccaaatgaaagaggaataagggagaccccgtgccaattcaccctaataaattttcctttccgctttatgtttccttttccgcctgatccgaactaagaatttatacgaaaaaaatgaggtccatggggattgtgtctcctcattaatattgggttataatcacgccgcgcggggaggcggccatggaaatcatcgatctggatgagcggttcgagaacgattacttcgtctgcctggagggctggtcggacgaaccgaaggaagccggccatcatcgggagacgtggttccggcggatgaaggagaagggtctccgggtcaagatcgccctcgtcgacggccggccggcgggcatgattcagtatgtcccgatcgagcacgccttcgccgaaggccgcgatctttatttcatccactgcatctgggtccacgcttacaagggaaaaggcatcggggaccagcggaaaaaaggcctcggcagcgccctcctggcggccgccgaggaagacgcccgggcgaaggaggccaagggcatggtcgcctggggcgtcggccttcccgtcttcatgcgggcctcctggttcaaaaagcacggctatcgcaaggtcgacaagaacgaggtcgccctccttctctggaagcctttcaccccggatgccgtcgccccgcggtggatccaggagaaaaagagacccgccgcggtccccggccggacgtcggtcgccgtgttccggaacggctggtgcacggcgatgaacatggtcggcgagcgggcccgccgggcggccgcggaattcggcgaccgggttgccttcaccgaggtggacacgtccgaccgggcggcgtatctcgaatggggcatcgccgacggtttgttcatcgacggaaagcccgtccggaccggcccgccgccctcgtacgataagatccgccggaaaatcgcccgccgggtgaaaaaaataaaatgacgtccatgacgccggccgtccgcgttctcaaggacctcgccgcggatttcgagatcaggctctatcgctacgaagaacacggcgggacggccgcggccgcccgcgccctggccgtcgaggagcacgacgtcatcaagacgctcgtattcgaaaccgacggccggactccttttttcgttctgatgcacggcgaccgggaagtctcggccaagcgactggcccgcatcctgggagtcaagtcggtcgcgccctgcccgccggccgccgccgaacgccacactggataccaggtcggcggcatctcccccttcggcgccaggaaaaaccttccggtctacatggaacggacgctgaccgaatccccccgcgtttggatcaacgccggcaagcgcggacaactggccggaatggccccggcggagatcctccggattctcgctcccgtcctgatcgaagcggccgtatgaacaacgcggggaggcctccctcaggccttcgattcatttgaagattgaggaagccgatttccaaaaaattgacagaaggggtatactcgctgcctcttgaagtgaagagaggccccttgttgcaggagatacaaaagctcaacgaacgcttcgccgcggccgaggcggaggacattctcggctggatggtccgcgcgcttccctaccagacggcgatgacctcgtctttccaggcgtccggggtcgtcctcatccacatgctgaggaagatcgccttcgattttccgatctatttcatcgataccggctaccatttcccggaaacgctcgagttcaaggcccgcctgacgcgggagtggaagctgaatgtccacaccatcgtcccggaaatgagcaaggtcgagcagctcagcctccacggcccccgcctcttcgaacgggatcccgacctctgctgccgcctcaacaaagtcgatccgctccgcggcctccagcgggagctcggattgaaggcctgggtctcggctctccgccgcgaccaggcggaaacccgccggaatctccggccggtgatgatcgacgagagcggcggcctgcggatccacccgctcctcgcctggaaccgggaacgcgtctgggcttacatcgaaaaacaccgtcttccgacgaatccgttgtacgagcagggatacgcctccatcgggtgtttcccgccgtgctgcacctctaaatccgaaccgggaagcgacgaacggtccggccggtgggccgggaaaggaaaactcgaatgcggactccacagccatctcaaaagcgaaaaatagcgggggcgggctccttgcggaagaaattcgtcctgcgttgcgtcctctgcggagccgaaatcgacggattcggcccttggttcgaggccgggcagcgctgccccgaatgcggcagcgaccgggccgacgtcgtttaccggaccacgcccgccaaggttcgcgacctcttccgccggccggccaacggccttccgggcatgtggcgctatttcgacgtccttccggtcaacgaccgaaaaaacatcgtcaccgccggcgagggcctcgtcccgatcgaccggtgggaattcctcgaggagtacgcccgccggcgcttccagatccgctgccaagtctacgcccaccggcaagacgacaactacgcgaccgggacgttcaaggacctctccggctcgatcgtctccagcgttctcaaggaaaacggcatccagaacttcgtcgcctccagcaccggcaacacggccgtggcctacgcccggtacctgacggccgccggaatctccttctacgccttcatcccgaagaacgcatccctgacccaggcggccgaaatcggctgcttcgggcagaacgtcttccgggtgaaaggcgactacaccctgaccaaggaaatcgccatggccttcgcccggaaacataagatgcccctggccgggggcaatttcgatccgatgcggatcgaggcgaagaagacgatgatgctcgaatggatccgtctgctcggcaagttcccgaccgtgtatatccaagccctgagcggggggaccggcccgatggctatcgccaagggctgccgggacctcgccccggtcgggctgggcggccggatgccccgcttcattctttcccagtccagccgctgcgcccccatggccgcggcttgggcggaagcgaagaaaaagaaataccccgagggctgggaaaaaacatacccgatctaccacaatccccggaccggcatcgccaccctggccgcgggctttcccaagacctatcccgtcctggccccgctcgtgcgggaaagcggaggggagatcctctccttcgacgaggacgccactccgctcatcgcccgcctggtggcgttcgaacgctccgtccggatcgggccggccgcggccatcggcctcggcgggttcttcgaggccttgaagcgcggactcctccgcaacggcgaccgcgtgttgatcaacatcggcgaggggatccgccgcgcgcccgaattcttgatcacgatgttccaggaaaaagccgaagtcgccacggtcgacgcctgccggcttttcgaccgccgcggacaccgggccgacatctggaacgagctggaaaaaagggtgatgaacggaaaaaccgcgcccgcttcccggcgcgggcgctaggattccggtttatcgacgatcccgtacaatccggccgagggccggcgaaggcggcaaactccgcgcggaggccgccgggttcctttttcagatcgaggcggaaggcccggcgttctttcggtcgcttcttcggaatcagccgatccaaagccctcccggttttctctgaagtctgaaggatattaggatccgcggatcacgccggtctttcgcggggggaagatccatcgccgccggccggcatcttcaagggcgatatcgcgcgggtgctcttttcgggcggagagacgaaatgaccgttccccggaccggatgatccgtcgtccggaaaaagcgttgtcagtccgaaaacaaagaaaagccccccggcggaccgggaaaggcgatcactcgtaccggacgagatgaaaaagatcgacgtccggatgggctttcctgatcgccgggatgccgccgaggaaggccagctcgatgaccgccccgaaaccgaccggcttggccttgagcatcttgaccaggcggagggcgctgatcgacgatgagccggtggcgatcacgtcgtcgatcacgacgacccgctggccggcggcgagggcgtcggcgtgcttctcgaagaactcgacggcgtattcgttgggcgcctggacgcagaccgtcttgcggggcagcttgccctttttgcggatgaccgacaggcccaggcggaggtcgcgggcgaccggggcggcaaagagatatccgcgggattcgatgccgacgatgacgtccggctttaagttccgggcccaggcggaaagccggtcgatcgtataatgatacgattccggatccaaaacgagcggcatgatgtccttgaacccgacgccgggtttagggaaatccttgacctcgaggatgcgctgcttgagctgttcaggtgtcatgaatgcctcggacgttgaaatacagacgcccttattagacaaatccgcggcggcgaagtcaaacggtttccccggcggcggggcgagccggacgatcagcggtcgccgcgagctgaaaacctcgaccgatcaaccgctcgatttcggccgcacgccggacgcttgacccggattgtccgcgttccgtccggctcgacgccgatatggacgcggatgccgtccagggggaagtcgatccgctcgccccactcgatgaggatgaccgcctcgccgatgtgatcctcgaagcccaggtcgcggatctcggcctggccgcccagccggtagaggtccaagtggaggatcggaacccgtccctggtaaatattgatcagggtatagctggggctgcagaccagccgcggattcttcatccccaagccggccgcgattccccgggcgaaaacggttttccccgccccgagctccccggtcaggaaaacgacttcgtcgccccggaaggcggcggccaagcgccgggccgcgagatacgtcccccgctccgtgcgcgtcgtcaggacctggtcctccgccggggccggtttcgtcacggctggaacaacctccccttccggccgccggccgcgtcttccagcgctttcatggcccgggaaagggccttgaggatgtccccggcgaccatcgcccgctggccgagctcggcggcggcgatgtcgccggccgccccgtgcagataaacggaggccacggccgctccgaaggcgttcttttccgcggccagaaacgctccgagaaggccgctgagaacgtcgcccgaaccgcccgtggccatgccgggattcccggtcgggttgacggaaacgcgcccgtccgggccggcgaccagcgtccggtatcccttgaggacaaggaggacacggtgctccgcggcgaaccgcgaagccagggccagccggtcgttcaggacctcgggaacggaccggccgagcagacgtccgaattcgccgggatgcggcgtcaacaccggaggccgggccgttttttttaaaaaccccagcttcccgacaaggatgttcaagccgtcggcgtcaatgactgtcgggatgcggacgcccggcaggagcgatcggaccaaggcggccgtttcgggatgggtcgaaagcccgggtccgacgacgagggcgtccttgcccgagagcaggcgttccaggcgcggccgggccgctccggcgatcgtcccctcttccgtttccggaagcggctcggtcatcagctcggacatcgtccgggcgaccgcggggacgcagctttcgggcgtcgcgatcgtcaccaagcccgcgcccgagcggtaagccgccttgcccgcgagaacggccgcccccgtcttcccccgcgacccggccaagatgagaacatggccgaacgtccccttgtgcccgcttctcggccgcggccggaaaaagggaacggcgttctccggcccggccatttccagcttcaattcgggcgaggcgagaagaacgggcggcagggaaatctccgcgacgacgagccggccggcgtagtcctcggccggcgggaagacgtgggcgattttcggcgctccgagggcgacggtcgcatcggcccggacggccggtccgatgacggcgaacgtgtcggacgagaggcccgagggcaggtcgacggcgatcgtctcggccggagattcgttgatgtccccgatgaccgccgccgcaagcccggcggccggcttggacagccccgtcccgaagatggcgtcgatgatgacggtcgcctcccggagagcccgcttcagattcaggcgggaccgcccggcggccgccgtcacctcgacgatttcgaggccgagccggaggacgatgtccaggttcagggcggcatcgcccttgacctcgttcttcccggccaggagaaaaatcctcggccgcgccccgaggttgaacaggtggcgggccgcgacgaagccgtctccgccgttgttgccccggccgcagacgatcacgatccgctcctccgccaaattcccgcgaagagaccggacttcctcggccacgcggcggccggcgttttccatcaggaggacacccgggatgccgaactcctcgaacgcccggcggtcgatctccctcatctgcccggcggtcagtattttcatggaatttcctcgggccgattttaccatatccgccggcccgcggctctcccgtcgacattccggcctcgcggggtcgcgttgcatttccggcttcacctgtgatacttttcaataatcagaaatcgataatccggttctttgaggagggcaaccgccatgccgattaaagttggaatcaacggcttcggccggatcggccggaacatgctcagggcctcgggcggttccgggatcgaattcgtcgccgtcaacgacatcaccgacgccaggacgctggcccatctcctgaaatacgactccgtgctcgggatttttcccggggacgtccagtcgacctccgacacgatcatcgtcgacggacatccgatcaaggtcctggcggccaaggatcccggcgagcttccctggaaggatctcggcgccgagatcgtcgtcgaatccacgggcaagttcaccaagcggcccgacgtcgtcaagcacatcgagaagggaggggcccggaaggtcatcgtctccgctccggcgaccgatcccgacgtgaccattgtgatgggggtcaacgagcggatctacgatccgaccaagcatcacatcctctcgaacgcctcctgcacgaccaactgcctggcccccgtggtcaaggtcttgcacgagctggccggggtcgagaagggcttcatgaccacgatccactcctacaccaacgaccagaaaatcctcgacgcgccgcacaaggacctccgccgggcccgggcggcggctgtcgcccaaattccgacgacgaccggcgcggccaaggccgtgggcatcgtcctgccggagctgaaggggaaggtcgacggcatcgccatccgcaccccgaccccggacgtctccctggtcgatttcgtcgccgtcgtccaaaagcccgccccggccgaggtcgtcaacgaggccttcaagacggccgccgccgggcccctcaagggcatcctggactacaccgacgagccgctcgtctccgtcgatttcctccacaatccgcattcggcgatcgtcgacggcttgtcgaccaaggtcatcgatggccatctcgtcaagattctggcctggtacgataacgagtggggttactcctgccgcctcatcgacctggtcaaatacatcgcaaggtgagtgaaggatgaagcttatcgaagatctcgacgtccgcggcaaaaccgttttcgtccgggtggatttcaacgtccccctgagcgagagcggagagatccggaacgacacccgcatccgggcgtcgctgccgacgattcgtttcctcagcgagcacggggcgaagctgatcctcgcctcccacctcgggcgccctaaaaaattcgacccggcggccagcctccgcccggccgccgtccgcctggccgagctcctcgaccggaaggtggagatggcccccgacgtcatcggacccgacgtcgaccgcctcaaggccggtctccgggacggcggcgtcctgctgctggaaaacgtccgcttccagcccggggaaacgaagaacgatcccgagcttgcccgggagttcgcccggggcgtcgacgtgttcgtcaacgacgcgttcggctcgagccacagggcccatgcctcggtcgtcggggtcgccgggctcgtcccggcgaaagccgccggctacctgttgaaaaaggaagtcgaattcctcggcaaggtccttcatccggtcaagcccttcacggccgttctgggcggggcgaagacggaggacaagatcccggtcatcgaatccctgctcgacaaggccgacgacgtcctgatcggcggggcgatggcctacacgtttctcgccgcccagggcaagggcgtcgggaaatcgctggtcgagcccgataagttcgatctcgccctcgggatcatgaaaaaggccgccgatcgcggcgtccgtctccgccttccgtccgaccacgccctggcgccctcgatcgattccggcgtcatcgaccggatgacgggcgaatatcccttccccgacgtcctcctgggcgtcgacatcggccccaaaaccatcgcgacctactcggcgatcatcggccgggccaagaccgtcttttggaacggtccgctcggcgttttcgagaatcctgctttcgccgagggaacgatgcagatcgcccaggccgtggccgcctccccggcggtttcgatcatcggcggcggcgattcgatcgcggccgtggctaaggccggcgtcggcgaccggatcggccacatctccacgggcggcggagcgagcctcgaattcatcgccaagggaacgcttccgggcctcgacgccctggaaggatgaagacgcggcgatgaaaaagcgtccgttcgtcgcggccaactggaagatgaacatgaccgccggcgagacgcgcgcctggttcgaggcctgggcttccctggccggaacggaggaagcggacgttgtggtctgcccgccgtacacagccttggccgaggccgcccgccgggccgccgggatcgccgttcatctgggcggccagagcctccactgggaggacgccggcgcctatacgggcgaaatctcggggccgatgctggccgacgccggctgccgatacgtcatcatcggccactcggagcggcgccggtacttcggcgagacggacgagacggtccggaaacggatcgccgcggccgtccggtccggcctgcggccgatcgtctgcatcggcgaaaccctggccgagcgggacgaggggcggaccctggacgtcatccggctccaattggacggcggcttggcgggacttacggaggagacgatcgggaggttgattttcgcctacgagccggtttgggccatcggaacgggccggacggccacccccgaacaggcccaggaagtccaccgggccgtccgcggccggctcgcagaaaaaattggaaaagcggcttccgggtatgttataattctttacggcgggtcggtgaaaccggccaacgcccgcgaacttttgcggaaaccggacatcgacgggtttctcgtcggaggcgcctcgctggaggcggcttcgttcggggagatcgtcaaggaatcgatccgggcttacaaggaagtgaattaacgtgacggctttattgacgattatccacgtgattgtgtgcctcgtcctgatcgtggccatccttctccaatccgggaaggcggccgacctggccggcgcgttcggcggcggcggaagccagaccgcgttcgggccgcggagcacgcagagcctcatgtcgaagatcacgacgatttgcgcggtcgttttcatgctcacgtcgctgggtctctggattttctccggacgcgaagctccctcggccgtcaagggcgtgaccgccccggccaagacggaagcgccggcggcggccccggcggaaaaaacgcccggacagcaaacgccggcgactgaagttccgaaacaataaccgccccgcatatgcgccgaagtggtggaattggcagacacgctagcttgaggggctagtgagcatttaaccgctcgtaggggttcgagtcccctcttcggcattccttccccttatccccggaagggggtttttcgccgttttttcgtcgattccctcccggacgatcgcagcgatgcgattcttgacaatcggccgatttgaatttaagttacgattaaattcagggaatttaccgggagggaatcatgcttgtcaaaaagctcgtcctgtgttttttccttgcctcactggcattatcatcaaccggattctcccaaaacgtaagcctctcaaatgacgcgttcgcggtcaaaaagaagccgccgcaaagaaggccgtcagacgcggccgagctaatcgaaaagctcattgagcaggccagggcggcaaacgcggatccggccgttctgcaaaagctgacggaatcactgaacgcggcgcggtcaatacctcttctggcggccgtcccggaaccggaagaaatcatcgccttcccggccggagcgacatccggcctcaagccggaaaaggaagaaaaaaccggaaacgcgggaggcatattcggcttctactacgggatgtccgatacattctcgctttcattcctctacaacatctcgggagacaataaagtcatcggcctgcccgaacaattcggatcgtttttgctgaatccctcgtcgaacggctcctcctttttagcgacaggcgaatatattttgaagaacggggcgaaaacgagcctggggctgtcgttccggggagggatttcattcacggattgggaggcgacgatcgccggcgcggccgtctcccacaagggccaggtcttttttttcgttccaagcctgcggttttgcactaatgaaaggaacttcggcgacaacaacacgctcaaaatcatcgtggacgtcgggctggggatcagggggatcatcgggaatctcggacaaacgccggagtttctatcggacaaagccgtcctgggttgggataaaaagacctttgtcgggggcgagttgacgatctcggccagaatcaacaaaatcacgccctttatcaggatcacctgttactcgccgaaatcggacattccgagcttttcggatttgcaggcttacatcggaatcgacgtcatttccacgctgttttcgtcgaaagtcaattcgccggaggaatgatccgcggatcgtcgattcggacaaatcccgggaatcggttcctcgtcgatccggactttctctccggccggataaactcatccggcttttcgttttctattcttcgcgccggaatgccccggcagctttcaaatcggactgaacgcacacaagacaaatcccccggattgggcgtatcctgatatcggatatcaatagtttttcagcttccccggaaacgatcgatctcggctccgcatcgaccctatcatggagcgtttccaatgctcaaaatgtcgtgatcgatcaagggataggcacggttgattcgacgggatcgatagcggtttctccgaacgccaccgtcacttatacgcttactgcctcaaatgcaaacggagccgtctccaaatcgtgcctggtcaccgttaaccaaccgccggtaatcaacggtttcgccgccactccgaatgtgatcacgctcgaatcatcctcaacgttatcgtgggatgtgtcgaatgccgttacaaggacaatcgatccgggaatcgggcaggtttcggcaaccggttcgacgattgtttccccgaacagcacgaccgtctatacgcttaccgcggtaaacggatcatttacggtgacagcgacctgcatgattaccgtcgattggcagaatttcatctgctataaaaccgctacgggaacaaaataccatcggggaaattgccaatacttaagtcagagtaagatccaaaccactctcggcgaggcatgtgctcaagggttgacgccttgcagtgtttgcaatccgccttcttgtagataacttgggcattattttgatgatgcggagggaatcatgacgggcaaagagatgaaatcgattctaataatactcgcatgcgcatttttatccgccgcttcaatccaaaaacaatcatcacgtttttgcatcaaggttatcgacggcgacacgatccttctcgacggcgatgaaaccgttcgattaatcggcgtcgattgtttggaaacaaaggatgcgcgtcatcggacacaacctggatgagcgcactcgtttccccggcgcggtgttcatcaaccgcaagggggtaaccaaggtttcagtctcctatgcggcgctgatgaccggccggcccgcttccggcccgccgctgacttggacatcgaagtacgactcgctcacgttcaacgccttcggccgggatttcccagacggcggaatgaacgaggctgggctcttcgtcggcgagatctcctatccgccgtccaagtttcccgccgacccggacaagcccgcgatgttcgtcagcctgtggatccagcacctgctcgacacctgcgactcggtcgaccaggtggaggcctcggcctcagccctgaacctggatggctggggatggcacttcctggcggccgaccgctccgggggtgcggcggccattgagtttctggacggccgggtcgtcgtccatcgcggcgattccatgccggttccggttttgtgcaacgagccgtacgaatacgaaatgaagaggcgcgaagcctatctcgccgcccgggaatcaagaacaggctccgccgcggaggagattccgcgcttcgtccaagccggagagatgatcgagacttacggccggcgttcaagcggagagaggaaagaggccgtcgattatgccttcgacattttagcggccttggagcgcggcggaacgcagtggtcgttcgtctgcgatttgcagaacggggaagcctggttcaagaccgcggcgactcccaaggtgaaacacgtcgccctgggcgggttcggcggcggcgacccggcttcggcgcgtttcctgaacatggacgccgacttctcgggcgaagcggggtcccgcttcgaggtctattcgccggcggccaaccgggaaatcgccgagcgggcttttgaggccattctcaggatttcgccggagttcgagaaagtgatcgaacgcatcggagagacgcgggcgagcctcgtcggccgcttcgccggctatcctgaaacgaccagccgctgacgccggccgccctcccctatcaggaaagcgacgccacccagagggagaaatccgtctccggcatcgcccccatcgtccggccggcttcatggccgcgccgcatcacgatgaacgtcgggacggcctggatttgaaacgcgccggccgcctggggattgaccgccgtattcacccggacgaccatcaggttcccggcccggcgcttggccagggcttcgaccaccggatgcatcacccggcagggcgcgcaggtttccgaatagaaatcgatcagaacgggaagagcggccttctggatcagaacggccagttgctcctcggtcggctcaagaacctcccccggaacgggaagcggcgtcttgcaccggccgcagacggccgtttttccgaccgcctcctcagggatctggttcgtccctccgcagccgagacagctgatcttgattttctcgttcacggcttcaccattttcgtcttggcgagaagggctttccgctccgtttcgggaaaacgctcgatcgcgtaacggagggaggtccgggggatcgccggcccgtgcttcaggagaaacgctcgaagacgcggcgcgtcggccttgccggcctcccggagaagccagccggtcgccttgtgtatcaaatcgtcttggaccggaaacagcctgacggcgatctcataaaccgcgtccaagtgcgttccgcggcgggcgatcttgatgaacgacacgaccgaggcccgcttcacccaccggttcgagtcagccgtccatgttttgatttccgtcacgaacttggggtccttttccagaatcggacccaaggcatcgggacagaacacgtcgaccagggcccagttgtccagccggtcggcccgcagccagccgcggacccgttccggaaacgaggccgggaattccttgcggaaccggaggaggatcagaagcccgagggcgcggatctcgtaaaaccgttccttgagcatcgtttcggcgaaggcgaccgcctcgggaaaaccccacgtcccccggaccttttgccagacttcggcctcgatttcccgcatcttcggcgtcgtcagtcccaggaactcgacctgttccttgaaataacggcgctgcccctcggcccgcttggggtcggcgcaggctttcaaagaggcgatcgaggcgcgggccgcgttctccggccgaagcgcggccgcgcccgattttttatcttctttcaaacggttcgtcatgagatgccatcctcctccccggatccgtatccggcgggaaatattaacatccgcccggcgaccgcgtcaacgaacggcgcagggaccgtcgtcccttttctccctcctttacgaggaagagttgcgcccgtttttggcataggccgccaggtcgagaaaaccgtggccgctcaagttgaagagaatgaccctctcctgtccggaagcccgggcctccgccgcctcggtgatcgccgcggcgacggcgtgggccgattccggagcgggaaggatcccctcggttttgaaaaagagggtcccggcgtcaaaagcctcggcctggggaacggaccgggattcaaccataccctggccgaccaggtggctgacgagaggggccatgccgtggtaccgcagtccgccggcatggatcggcgcggggacgaaatcccggcccagggtgtgcatgaacaggagcggcgtcagaccggccgtgtcgccgttatcgtagcgcagatcgccgcgggtcagcgaagggcaggcttcgggctcgacggcgacataccgcgtcttcctctcgccggcgagagaaccgcggacgaaaggaaaagccaggccgccgaaattcgatcctccgccgacgcagccgatgacgacatccggttccgccccggccgcggacagctgggccgccgcctccaggccgatgaccgtctgatgcattaaaacggcatccaggacggagccgagggcgtatttcgaatttttcccgccgacggcgacctcgatggcctcggagatcgcgatccccaggctgccgggatggtccgggtccttctcataaagcgctcggccgaaattcgtcgatgggccggggctttcctcgaccttcgccccgaacatctccatcaccgtccggcggccgggcttctgccggaacgaggaccggaccatgaacaccctgacgtccacgccgaataaagagccggcctgggccaaggccgagccccactggccggccccggtctcggtgacgagcgtctcaaccccctccgccgcggccaaataagcctgcatcaaggcggtgttgctcttgtggcttccgacagggccgacgccctcgtacttgtagaaaacatgggcgggcgtgtccagggcccggcggaggccggaggcatagatcaggggggtcgggcggtaaacggcgagtttttcccggacctccttcggaatcggaatgaaccgctcccgggtgatttcctgggcgatgaatccccgggaaaaaacagcctccaggtccgaaggccgaaggggagctttcgtcccgggatgaagaggcgggggcggacaggccggaaggtcggccttgatattatagaaatgttcgggcaggaaggcggcgttccgggccgcgaaccgctcgggggaaatcgttttcgacatgtctgttctcctttcagacgtcttcccgacaaggggaatttgaccggttttcaggaacgccggaacgacggcgcggcgaaacgcccgccggctcccgacgcgcggaaaaagggtaagggggtggtgttacagggcggggagatccgcccaccagaacgacacgcggagaacggcccggaagagggccgggaagatgatccgcgtgatatggtcgttcatttcccggcgatgatagacgatccaaaggtggttgtcaagaaaaaaatatcgaaggatgggggacggccgcctcagacgatcgcccctcggcaagggggccgagaatctttcccgcctcgagacgatgccggcgacgatccgtttcaaacacggccggcggaaccattacggaagccggcgggcttcaattcctcgggatgaagcggagaccgccggtcgtcgcatccggttcgagaaggtagatatcccattcctcccgctgccgattgggcgcctcttttttctggcacatcaagaggttgcggccgtcggtcctgagattgaccgccccgtagaccgagacgctccggttgatcagcttgttttcaagctcggccagccgggtttcggccttgtccctctcccgcgcgccgacatccgcccgatggagagtcgctttcagatcggcgaattccttcttgagaacgaaaggatttttcacgatgtcccgggaggaccgggccagctcggtcgagaagatcagcggccggcggccgcggccggctttccccaggaagcccatcgtatcggcccggggatgggagtaggattcgttgtccccgctggagatgatcgagacataggggcaaacggcctcgatgaactcctcggcgaagtcgccgctgccgtggtgataggctttgaggacgtcggaccggaagatccccggcttgtctttatagaaatcaagcaggaatttctcagacgggatgttcaagtcgccgcctaggaggatcgagacgctcccatagtggatgcggagcacgacggaatggccgtttttggtcatcgggacgcttccagagaacgtccggagacgtccgcgcgaaccgcccggttcaagcacgggacccaagaccgtgaccgatagtcccggaacagccgtgagattcgcgatcccgggcgcaccgtgatgaatcatccggacggtcgtcgccgggtttttcatccggaggcgatggaccagggaggggtattccaggctttgccagccggccgcatgggcgaagaaatcgtcaagatcggcctgggtcacgatcggctcctcgagatagccgatcgttccaaccttggtccgggcgcccagggagtccaatccgctccccgcccgcgggaaaaggccgttgtgatagacggcttcgaaatcgatgagcgaaccgaatttcggatcgtcgagaatgccgcgaagccccccatagtgatcgtcgtccggatgggagatgaccagggctttgatccggccgcccatcgcccgcatctccgccgtctcgtagttcttgtatcgccatcggagatagcggaggaggttgtcttctttgccggcatcgacgatgattttttcgtccgccggggtgacgaccaggcagctgtcgccctggccgacgtcgagaaagatgatgtccagaagcggatcggactgcacgtcggattcgcgcatccagccggagacgtcgcggctcgaaacccggacccagccgttttgaggcccgccttcgcggacgaccgtgtctccccagaacaggtgtttcgcccggttcttttcgtccgagaggtccgcgggattgtaaatgaaagctgatggatacgcgcagaaacaaacggatttttcaggcacggaatccctccttcaaacggatgaacgtctccccgttcccgatgatttaacaggaatgtaaatccggagaagggaaaaatcaaatctccggcccgcgggaacgccttactcccggaaaagacgcgtcgccgggccgttcacggcaggtcttcttgactcccccggacgaaatggggcatcgccgccgggaggacgagcgaaagctcgaggaatccggcataagcgccgttttccttccacggcgcttggtagatcaatttccggacgccgtttttctcgatcgtgtagacattcgtccggccctcggccagaagcgcccgcagcttcgtccgggcgggctcggggtggcatgaaaacacgctcgttccgagaaggcggtctccgccgccgccggcgaacgtctcgatcgcccggtcgttcatcgctaaaatgacgccctctcggtcgcacaccgtgaccgcgccgggaaagcctcggaacaatgtcgcgtaatccatcaagcgcctcctccataatcgtcctcgaacccggtcatccggcggttctccgccgcggcggatttcccgcgagggtgatcgttttgatgagcattgtcgcataggatccccggggcagggagaaccggaaaatgattttttcccggcccggatggagctcgtcggcgccggactcgaggaccgtgaagccttcggggacaacggccgccgtccggagaaatgactggaagcggacccgccgcagctcccgcgtccggaaatcggaccgggccaagcctttatccgccagcacggcggcgaacggcgcctccgcctccgggtcgggaaactccattttcgccgcggccgtagggatgcggagggcatggagagcggcccggtcggccttgccgagcttccgccagaagagataggggccttcgcggccggcgatttcaacgaccgggaggccgcggctccggaagattttccggagggtttcgttccagagatgagcctggaaaacggcgtactgcatggccgtttcctcctccgggatgcggtgcagggcttcgccgaaggcggccggttctttccggagaatgtcgaacacttcccgctcgaagggtccttcggccatcgaccggcaggccttccagtcccgccagacgcggaacaactcgagccgccgggtccgctcccggccggcaagtcccggagtgaccgaggtcaggtagacctggagagccccgttccagtgccggcggaggatcttctcggcgaaaaaaccccgctcgggatcgtagctccggaaccgctggtcgtcgaaccagttgggaaacccttccgtcttgatccgcccgacagccggctccaaggactcggcgccggccaggtcccggagggtgacggtgaaatcgttggcccggatcaagtccggccccatcggccggttcatccggccggccgcctcgagccggaagtcctttccctcgaggctccggtcggccgcgtcctcgatggtgatgaactgggacgtcaggccgtgcttgtctttttttcccccgtaagcgatccgcccgggaggaaatccgaaccggcgggccaaatggccgacaagatccgaggtgttccagccgcttttatggagccggtagacggcgtagcggcctcccggctcgagcgggagatcggccctctcctcgacgacgaaatctccgggcttggccttgatcacggcccggattataacacggccttcgcctttccccgccggcggacgaaatcgtcggttgattcccgcttcggattcggttaagatgccgtctttccgacgggaattgcgcctccattaagaaaggtatgttccgatgaagcccaccggccccgccctcagcaaggttctcctctggcttgcggcggccgcggccgtcgccgccctcgtcattcttccgcggattttcaaatccacgcccgcttggtcgacgacggtcgcgacccaagacgccctggaaaccgtcctggcctcgggccgggtcgtcggggaaaaatccgttcccctttccttcgtccggccggggaggatcgccgccgaattcatccgggacggcagccgaatcgcggcccattccgtgctcatgcgccaggacacccgtccgctggaacaagccctggcccaggcccagaccgccttggccgaagcccggctcaagaaagacaagcttctctccgtcgacctggccgacgccgaggaaaaggtccgccaggccaaagccaacaacgcctacgccgccgattttttcagccgccaaaccgaacttttcgctcaaaagtccgtctcccttcttcagtacgaacaaagccggagggaccgggatttggccgcttccgccttggccgcggccgaaaaccaactccggtcgctgaaagaagtgcagaccgtccaggcggacttggcgatttccaagacggaaaacgacctcaagaaagccgagctcgacctcgacgacacgattctcaccgctccggcggccggcatggtcgtttcccacgacgcccacgcgggcgaattcgtccaggccggccagcgcgtcgccctgttcatcccggaagcgccccggacgtccatcgaaatccaggtcgacgaaaccaacgccggccggatcgctccggggcaaccggcctccgtcacttcgccggcgtatcccggccgcgtcttcaccgggaaagtcgaacggctgggagccatcgtcgacgcccagcgcggctcttttcccatcgtcatcgccctggaccggttcgagccggatctgttgcccgaatcatccgtatcggcccagatcacgaccggccgggcgaccggcgtcctgcttctcgagcagcggttcatcctccgcgaaggagagaaggcctccgtctacatcgaggaaaacgggagagccaaaaaggttcccgtctcggtccgcgacctgggcagcggcttattcgaatgccgggaaggattgaaaagcggtcaatccgttctgcttccgcaagggctgaaagacgggctgaagatcaagctcaaaccgctccccgaataggccatgttcgacgttttcgtcgcttttcgcttccttcgggaaagccgggcccaaacgttcctgatcctgggcggcatcgtcctcggcatcgccgtccaggtctttctcaacgccctcatctccggattgcaggccgatctcatccgaaagacggtcggccatgcgccgcacatcatcggaacgacgcccgacgccgagcccgtcgccgttctgccgtccgacccgcgggaaaaaacgatcgttcgcatcgtgaccaacgaaggcggcgtcaaggtgattcgggacggggccgtcatcggaagccagattgaaaagctcggcgccttcacggtcatcctccccgtcgcccggggatcgggatatgtctggcaagggcaaaaaatcctcccggtgattctccggggcgcggatctcgagaccgcggaccggctttacgatatccggcgcagactgaccgccggccggtacgaagtcggcccggacacggtcctgatcggaaaggacctggccgccaagcttcgcctcgaggccggctcggtccttcgcctgtccgcggccggcggcggcgaggacctcttccgggtcggcgggatcttcgacctggaaaaccaagttctcaacgaaacttggattctcctctccctggcccgggctcagaatctcatcgggctcgaccggggcttgtccgaaatcgagctccagacgaaggacgtgttcgaagccgagcggcgggcggccgagcttcgggcggttttcccctcggtccgttggcggagctgggaagagaccaacgcctcgctcctttccgcccttcggagccagagctcgtcttccaccctgattcaactgttcgtcctgttgtccgtcaccctgggcatcgccggcgttttggccgtttcggtgatccagaaatcccgtcagatcgggatccttaaggcgatcgggacgatgacccgccatgtcggaaggatcttcgtcatccagggcgccgtcctgggttttctcggctcggttctaggcgtcctggccggggccgggctcattttccttttccagggcatcagcggcggctccccctccgccttccctttctccgtctcgttcggcgcggccgccgtctccgtcgccgcggcgaccgcggccggaacgctggcggccttcattccggcccggcgggcctcccgtctcagtccgatcgaggtgatccgcaatggctgagttcctcgccctccgcgacatcgttaaaatctacgggacgacggcccggacgaccgccctccggggcgtgagcctttccctggcggcgggcgaatacgcggccctcatcggccggtccgggtccggaaagtcgacgctcctcaacatcatcgggacgctcgaccggccgacctcgggagagatgcgggtcgacggccgggacatcttcgctctcgatgacgacggcctggcggctttccgcggccggacgatcgggttcgtcttccagttccatcatctcctccccgagttcaccgccttggaaaacgttctcctgcccttccgggcggctcacgggcggacgaccgccgcggcctccgtccgggcccgccgcctcctcgagcgcgtcggcgtcggcgaccggatgaaccataaatcaaacgccctgtccggcggacagcaacagcgggtggccgtcgcccgggccctcatcaatgaaccgcgtctcatcctggccgacgagccgaccggaaatctcgacaccgaatcgagcgaggccatcaaggcgttgttgcgggagatcaaccgggaaagcgggacgacgtttttgatcgtcacccacgaccgacatatcgccgccggctgcgaccgggtcgtcgaaatcgacgacggggggatcgtccgtgatttccggccgccggaaacgacggcggatgaagcttgggccgccctggctccctgcgaatgccgggagcgagttcgaggcgatggggggccggcgcctactcgaccttgacggacgtgatcgtcccctcgccgccgcgtcgttccaggatccaggaaaaacggccgccgatatccccgtcatgacctgggcgaacacggcccgggtcgcgtacgccggatagcgggccgcctggaaatcgagcttcaggttggaaatcacgatttggatgtcaagggaggcgcttgtcatcatttccaggtcgggccgaaggcgctgatagacgtccggcgcggcatgatcccggaagaaccccgccgggtgcttgattttatagctcaggacgtattaatccgaccaagtcctcgattccccccgtagccaagcggatgaccgcgtccagggcgaccgttttggccgcgtccagggcgtcgcgatacccccccccggttcagggcttccgaggcctgagcgagcttccgggccggagtcgcctgaagcggaacctgaacggctgacgctggtgtcgaaggaaccatctcggccggaacggacggaacggctccggccggcgatcggtcggtcgcttttcccgtctccggccggaacgtcccggctggaagcggcggagcgttattcgcgtcgcttccgaggattccctttgcggaaatctccactttgagcgatccgcccgcccgggcggcgaccggggcttgtttccgggacgaacgaaggaggatcgcggcaaggacggcgacaagccccatcatgagcccgacggcgagaagaagcggcttccgtcgggaggaaggcgaaggcgacgacctgggcgagggtccagcggatcccggaggccgggagggattcatggtcattcacgaaacagcggccgggatgccgccgatcttcacggcttctcctccggaaacggaggaatccggacagtgtcgtagggccggacggccggagcgtcgcccggttccttgaacgaagcgacgacgaccgtgatgttgtcgtccccgccggcggccttggcctcggcgatcaaggcggcacaggccgccttggggtccgggtgttttcttaaaacccgggacatccgtttttccattaccaggccgtagaggccgtccgtgcagaaaaggaaaacatcgtccccacaggcttccacgtcgaacgtgtccacgatcacgttttgttgatatcccagcgaccgggtgatcatcgagcggaacggcgattgccggatttcctgttcgctgagaagacggcggcgccgctgttccccggcccaggaatggtcttcggtcagctggcggagatccccgtcgcggaagagataagcccggctgtcgccgacgttggccaagaagaggcgctcccctttcccgatcgcggccaccagcgtggtccccatcccggcgtaaaccggctcccgggaagcccgttcgaagatgagccggttggctttccggaagacatcgtccagatacgaccggggatcgacgccgtccacgcgctcgatctcctccctcaggatctggacggccatggcgctggcgaccgctccgccggcgtggcccccgatgccgtcggccacggccaagagaaacgccgccggttccgacccggccggcgccgtggacaggtccaagcaaaggaaattgtcctcgttgacttcccggacacagccggcgtcgctttgcccgaacgcttcgattctcggatacaccgggcctcgtttcggaacgcctcagctcttcttgaatatcaggacggtgcgacccagctcgatcacggccccgtttttcaacggcgtcgggccgctgatcgcccggccgtcgacccgggtcggattcgtcgcgctttcgtcggcgatggtgaattctttcttcgcgttgtcgtaatagatcgaggcctgctccttggagacggtgtcgtcattgatttcgatctcgtttttccggctcccgggacggccgatcgtcgtcacctgctggtggagggggaactccttccccttgtccggacccttttcgacgatgatgtcggctcccaaattgagaaacagccgggtcttggcccccctcggcgcggccgcgggcgccgccgggggaggagcgatccgggtcgttttagatggatcgaccggggccgccggccggatggtttcctcggcggccggacgcggcttgggcttcgtcaggagaataatgaagacgatcaagagaaagagaaaggccgcgcccgcggcgatcaacaggtagagggtcgtattggtcatcccgggcgaggaccgggaaatctccttcatgagaggaacgttggcctgggccggatcctggatgaggactcccctcacccggaaattacggctgacgggggggaggtcgttggtccggatcgtcagcggattggggcagctttcgtccagcatcgtgtacgttccccgggtcgttccggccggattggggatcacggcctggacctggccgacgacggtcacctcggtgttccaatagcgggccggattggcgagaatgtcgacgatccaggtctccggggcggcggccgaagcgctgaagacgagaatgaggccggcggcggccatgatcggaaggacccgggttctcttcatgggactcctcctctccgcggatttgacatcatgctatccacaaaaaaaatctttgtcaacgcgccggccggcgccttgacaaccggccggaaatcgacgataatccagtttgtaatggtttcaaatacgtcccgtttgcgcgacatcttggcggaacgagggatcaagccgacgtttcagcggttgacgatcctcggggccgtcctcgataaccggtctcatccgacgatccgggatcttcacgcccatctcgtccggacgattccgaccctgtccaagaccaccctgtattccaccctggagcggttcgccgccgaggggctggtccgcccgctgatgatcgacccggccgaagtccgctacgacggcgctccggccctccaccatcattttcagtgcacggcgtgcggccgcatcctggacatcgagatttcctgtcccaacagccgggccggcgagatccacggccaccggatcgacgaggtccacggctatttcaagggcgtctgccgtgattgcctgagcacccccggccggtccgccggcgcgccggcatcccataaaacccaactgaaaaaaaggaggaagagtcatggctaaagccaaggaacgttttcaaatctttcactgccccgtctgcggcaacatcgtcgaagtgttgaccgccggcggcggcgagttggtctgctgcggccggccgatggagctgatgacggaaaacacggtcgacgcgtccaaagaaaagcatgtcccggtgatcgagaaaaccgccgacgggtacaaggtcaaggtcggatccgtcccccatcccatggaggaaaagcattacatcatgtggatcgagctcatcgccgacggccgggcctgccggaaattcctgaagcccggggaggcgcctgaagccttcttccgcctcgaagcggaaaaaatcacggcccgcgaatactgcaaccttcacggcctgtggaaggcttgaacaaacaaggagaacgtcatgccgaaatccatcaaagggacaaagaccgagaaaaacctgttgaccgccttcgccggcgagtcccaggcccgcaaccgctacacgtatttcgcctcggctgcgaaaaaagagggttatgagcagatcgccgcgatcttcctggagaccgcggaaaacgagaaggagcatgccaaagtcttcttcaaagccctggagggcggagcggtggagatcatggccgcctacccggccgggatcatcggggacacggccgccaacctcaaggccgcggctgacggcgagctcgaggagtggtcggtgatttacaaggatttcgccggcgtcgccgacgccgagggattccccgaggtcgcgacttctttccggatgatcgccaaggtcgaacgggaacacgaaaaccgctaccgcaagctcctggccaacgtgaccggagggaaagtcttcaagaaggacgctccggtccgctggatgtgccgcaactgcggctacgtccacgaaggcgtcgaagccccggccaagtgcccggcttgtctccatcccctggctttctacgaaatcaaagccgagaattattgaccggcgcgtcccgggccgcgttttttccaggcgggcgcgtttgagccgacggcttccgcggccgggcggattcggaagcccgcccgcatgaagccggctctgtgattcaacggaagcggaaatcaacggggaggaaaagtcatgaggggaaagaccatccggagacgagcctggacgccggtcttgttcgtcggggccgggctggccgccttcgccggcgacgggaatttcatcccgactccggccgaagccgcgggataccgggagtacacgcggaacgaatccgtcgccgcttttttaagcgagctggccgcccgggcgcccgccctccgcgtctcggccgtcgggagatccttgcccacggaagcctgcggggcgatggatctcttcctggccgtcctggccgaaaagcccgcggccgcgccggcggagctcgaccggacgaaaccgacggttctcatcaccgccgcccagcacggcaacgagcaatcggccaaggaagcggctctccggctggtgcgggacctggccgcgggcgagctgtcccccctcctcgagcgcctcaacgtcctggtcatgccccaaaccaatccctgcggcaatctccggaacgtccggggcaacgagctcggcctggacatgaaccgcgatcatgtcaagctggaaacggagggggttcgggccatccaccgcgtcttccgggactggatgcccgaggtgacgatcgacgtccacgaaaagggagatgactattaccggatctcgatcggctgcgtctcgaacgcgaacatcgatgcgggtctccaggacttctcccgcaataccctcctggctgagaccggccgggccctggaaaaacggaaggtcacgttccatgaatacctggtcacggaggacctcggggtcgacacctcgtccggctcggcccgggcggcggaacgcccggcggcccgcgaggagatgaagcgctactcgacgaccgacctcaacgacggccgcaacagcctggggattttcgaaaccctctcgttcatccaggagggcgcgtcccgccatgacctggaaaccctccagccgcggacggactggcaatacgacggcctgcgggccttcctcgaatcggcggccggccatgccccggaaatcctggaactggtccggagccggagggcgcgtctgctcgaacgggccgccgggcgggtgcccggagacgacgtccgcctccggatgaagtacgtccgcgatcccgccgttcccgagctccgcctcaagcggttcgaccgggaagggccgcccgtccgcggcgttctccgggtcgataaaaaagcgggcgaggcggtgactttcgccgatctcctcccgccgctggaaccaggcggcgccgccgtcgtcgacgagatcgtcaagaactggttccctcttgtcgagtcgactctcggcgtttcccgcccggccggttatcttttcgagggcggccgcccggagatcgccgagacgctgcgggccctcggagtcgaggtcgggatgttcgcccgggacgttctcgtcgaggccgaagtctatgaggtcgagtcgatcatcccggcccggttcgattacgaccccccggaacggatcgatgtcgcggccaaagccgcccgcctcccggtccggaagggcgatttctatgtctcctgcgtccagccggcggctcatctcgttccctgccttctggagccccagtccgactacggcttcatccggtacgggaaattcaagctgatccccgaggccggagggctttacgagatccgccggtacgccgggaaagaagaccttccggttgttccctaccggccttggcggccttagccgctagccccaaaggctccgcgggtattccccggcggcgatcagactctcgagggaggccatcacggccggccggtccgccttgtaggtcacgccgaaccaacgggcggtcgtcgggagaaccaggcaatcggccaggccgtcctcgatcatccggttgacgacgagggggatgaagaactcggctttcggatcgttccgccgctcctccaggaaccggacgaactccgtccgggcgaactggaaataggtcggggtgaatccccagaaattcatcgacacggtccgtccctcgcccagggagatgtggcggccggagggatcctcgaaaacgatcccgaacttgctccggatgatccgggtccgctcgacgatgccggtcaggaacccggccggattcacctcgcagacgccccgggcgacggccccgtaatccgacagggtcgcgtcgaggtcgtacccgacgacggcgtagcgggattcggcggccccgacgtcggagagaaaggcggccattttctgaaaggcatcccggccgtaaaaatcgtcggcgttgatgacgccgaacggctcgcggatcttggacgcggccgccagaacggcatgggacgtcccccaaggcttggtccgctcagggggaacggtaaatcccgacggcaggtcgtcgatcgcctggaaggcgcaatccgcttccatccggccctcgagcttcttgaggatgacgtcccggaaatcctgttccatgctcttctggatgatgaaaacgcaccggccgaatcccgaccggagggcgtcgaacagcgaataatccatcagcgtctcgcctgaagggccgacgggatcgacctgtttcaggctgccgtaacggcttccgattccggcggccaggatcaccagggcgggcttcatcatcgggtcctcctgaatgatccttattatcataaaggcgatccgagttccacctccggccgcggccggaattcggcaacgtaacgggggtgttttacgtatatatcagcagaggccgggaacaaggacgttgacaacctgtaagtcgcatggtaagtgatggatatgcttctcaaatgcccttcctgccaggccgataaccagcccgacagccggttctgctcccgctgcgcgactcccctgccccaggaagcgccctccgattcggacggcctcaccaggacgatgatcgcctcgatcgaccgcctggagcgcggaatcctcttcgccggccgctacgaaatcatcgaggagatcggccggggcggcatgggccgggtttaccgggcctatgaccgccagctgaaggaagacgtcgccctcaagcttttgaagccggaaatcagcttcaacgaaaaagccgtcgaacgcttccgcaacgagctcaagttcgcccgccggatcgcccatccccgcgtctgccggatgtacgacttgggtgaatccgggctggcccattatttgaccatggaatatgtcgaaggcgaggacctgaaagccttcatccgccgctccgatcacctgacgacggccaaggccctggacatcggccggcagatcgccgagggcctggaggaagcccaccgcttgggggtcgtccatcgagacctcaagccccaaaacgtgatgatcgaccgcgagggcaaggcgaaaatcatggatttcgggctggcccgaatctccgaaaccgaggggttgacgggatccggactcatgctcggaactccggaatacatgtcccccgaacaggtcgacctcaaggacgtcgacggccgggtcgacatttacgccctgggcatcatcctttacgagatggtcaccgggcatgtcccgtttaagggcgaaacacctttggccgtcgccttgaaacagaaaaacgaaaaggcccgtgacgtccgggaatcgaatccgctcgtgccggatacgctgatctcggtgatcctgaaatgcctggaaaaggatccgggccgccgctatcagaccgcggcggagacgtccgaagcccttctggaggtcgagcgaggattgtcctcggccgtcctggagatctccaagaccgcgacccgcggctcaagcgcgcacctccgcccccggcggatcaagcgggcggtcgccgtttcggcggccttggccgttttagccgcggcgatcgccgctgtcgtattcctgaccggaaaacggaatccggccccatcggcccggcactcctcgatcgtcccgaccctcgaaggcgccgaggaggagtccgtccgtaccggccgggcgcttctcggcattctcggttccaaggatcccgaaaacgtgaaggccgtggaaaagacgctcaaggaaatgcgccgatacctgccggaaagcggtccgagcgtggaagcctggaaacaagcccaggagaaatttgagcggagccgggcgggggatccggcctcggccggcgctcctgaaatcggcggcgaaatgcagcagttgatggccgtcatctccgaacgagaatccgcccgccggtcccgggattccatgatcctggtgaaaaccggcctccgaggctggtcggccgacaacaacttccttttccggctggcccagttcgaggaacgcaacgccgacgacgctttcgccaagaatgattacgccgggtcccgggccctctaccggcttctggaacggatctacctggccgttcccaacggcaagaccgcggcccgcggcgtcgtcgccctccgggaaatcgttaagagcctgaaaaccgaggccgcggtcgttcccgaggcaaaaatcgactcctggctggcctcctccgcccgggagatcgcggccgaggccgaatcattcgcctccaagggcgacctcgagaacgcctgcggagcgttcacccgggccgcctttttgcttcaaaaaatccgcgacacgggctgaagcgccatcaacgcttgatccaagccgagcgccaaaaagtcctggcgcgcacgtccccggagccgcggaacattctttcttccaccgccgcgtcttcggttttcggcggagcggggcagaagcccaggccgaatcctcgactctctgcctcccgtaaagcgggcgcacgtccccggagccgcggaacattctttcttccaccgccgcgtcttcggttttcggcggagcggggctgaagcgccattcatcgcctcaggtcgatccaccgccaaaaagtcctggcgcgcacgtccccggagccgcggaacattctttctcccgctacagcgtcttcggttttcggcggagcggggcagaagcccaggccgaatcctcgactctctgcctcccgtaaagcgggcgcacgtccccggagcggggcatttgtcgcctcttcgcaaatgccgcggagcggggcagaagcgccattcatcggctcgcccgggtccgccgtagaaaggtcctggcgcacacgtccccggagcggggccgaagcgcggaggttatgacggccggagcgaacatcgtccggattaggcttttctcgatgcttgcttgggaagccggctcggaagaagccggccgagcgaagatgtttgagcgtcccgcgccttgaaccgttaaaaggtcttccgggacgcgagttcttcgccgccaagccaggccgatcgagaaaagccgtcaagatccggacgcgtgagcggaggccgttataaccccgcgatattttctcccgccgccgcgtcttgggatttcggcggagcggggcagaagcgccattcatcgcctcaggtcgatccaccgccaaaaagtcctggcgcgcacgtccccggagccgcggaacattctttctcccgctacagcgtcttcggttttcggcggagcggggccgaaatccagccccgctccgcctgatttccattttacttccggttgccgcggatcggatacggcggccggatcggcttcttggccggcgatttggccagctcctccatcacgatggcgatcgcccgctcgagctgcggatcgccgccggcggcgaccgcggccggatcctgttcaacctcgacatccggcggcacgccctcgttttcgacgatccagccgtcctccgtccagatggccaggttgggcgcggtgacatagccgccgtccatcaggacggggaagccgagcgtcccgaccaggccgccccaggtgcgtttcccgaccagcgggccgattttaaacttgcggaacatccacggcaggaggtctccccccgacccggcggtttcatcgatcaacatgaccttggggccttggatcgaagcccccggcgctttcatgtcggcgccgtgccgcatgttccaatagctgatctccggccggcgcagatgatcgatgtaataatcggcgatcaagccgccgccgttgaaccgctcatcgacgatgaccgcctccttgtcggcctggggatagaaatacctcttgaaataagcgaatccctggtacgacgtgttggggacatagacataggcgacccggccgccggtggctttctccaccttcttcaggttgccttccacccagtcgcggttgcggagggccagctcgttttcgatcggcaccgcccggacggtcctggctccccggccgtcgggaagcggcccgaccttcagctcgacgaacttgccggctttgttctcgaacaaggcgaagagattatccgccggagcccgcagctcccggccgtcgacggccaggaggtaatccccctcggccacgttcaggccgggctcggtcaggggcgatcgcaggtcgggattccagttcaatcccccataaattctcttgatccggtaccggccgttttcaacggcgtaatccgccccgaggagtccgcccggaacggcccggttcgcggccaaaaaatccccgccgccgacccggtggtggccgacgccgagctccgagcacatccactggatcagccggttgagatcggcccggcaggacaagtccggcaaaaacacttcgtattttttccgcatggcctcccagtcggccccgtgcatgttgtcggcatagaagtaatcccggttgatcctccaggcctcggcgaagatctgggcccattcctcttccggaacgaccgggacgccgatctccccgacctgaagctgtccctggccggcggccggcttgggctggagagcggtgaggaagaaggtctccgacggtccggagtacaggattttcttgcagtcgaaggagagcgtgtactgaaagacgccggtcaagaggacctcgtccttgcgggatttgaaatcataccggtgaagcaggccgccgcgcgcggccgcgggcgagccgatgtccggcgggctttcaagataatagatctggccggcctcgcccgctttcaggatatcgtagcttccgggcgggacgggcacggcgacgatccgccggccgatcccgtcaaaatcgatcttgacctcggccgcaggggccgggcccgcgggcgcggcgggagcggccgcctccttcgttgcgacaccggggacgggtttggcgggcaagcccgtctcctcgtcgctttcccgggcgaggggattggccgtgtccttggccagggacacgatgtaaatcgagctcgtcagccgggcgtcgaacttggacaggtcgaaccattgattgatcggaccggcatcggtcgaggcgaaaaagtaaaggaacttgccggaggcgtcgaaaaccggccggtaggcctcgctcaaaccgtcggacacggggaaagacttgtcctgggcgacggaatagacgaagacccgctgaaaataagaggcggtgcccagggtataggccagccattttccgtcgggcgaccaggccgaagggcttttccgccccccgagctgataatcggccccgattttcttgatgtcgccgttctccaggtcgagaacgtaaatcgcccgggcattgtcatggaaagcgatccgccggccgtcgggcgaccagaccggcgtttcgtagaagccggagccggcgagggcatagctccgggacgtcccttttccgtcttggggacggacctcgagggcgtattccccggaggcatccgagaaataggcgatcgactttccgtcgggagaccagacgggagaccgttcatgagcccccggcgtccgggttaggttgcggggatcccctttctcggcgggaacggtcacgatctcgccccggaactcgaagacggcccgggccccggagggcgagagctcgccgttgcggatccacttggcccccttggccgtccgctccctgagctcggccgcgtcggtcgcaatcccgatttgaaggcgggtcgaggccccggaaacggggtcaaggagatgaagaaacccggcctgctcgtagatgatccggccgtctccggccgaggcgctgagaacggggaaatcttcatggcgggtcaaggccttgatttcccggctccgggggtcgtagctgtagatgttgaactccccgtcccggtcggaccgaaagtagatcatgtccccgatccacatcgggccgggatcgttgcagcggccctcgggctggggaattttttcgtaagacaagtcgtcgaggttgatgatccagatggtcgaattcgtccccccgcggtaatgcttccactggaggaaggagtccgacagggggttggtcgccatctttttcccgtcgggcgagtagaccgcccggaaggcgttcggaatccggagcttttccgggaatccgccttcgacgggaacggtgaacaactgctggtaccggccggtgaaaacctgccgggcggacgtgaacaggaccgccttcccgtccggagtgaagccctggacgatgtccgcgcccgggtgccaggtcagccgccggggcacgccgccggcggccgggacgatgtagacgtcggtgttgccgtcgtactgggcgctgaaggcgatcaatccgccgtcgggcgagaacgccggattggattcgatgcccaggtcggacgtcagccgccggacgttttttccgtcgagatcggccgcccagaggtcattggcgtaatggaaggcgaggccgcttttcccgacggccggctgagtcatcatccgcgtgtcgcggatgtcgatcccgaacccgagggagacgaaggcggccagcagggcggccgcgcagcgcgttccgattctcatgatcctcctccttgatgttattttccgttgtaaggaacgccggtcttgatccagtcggccgccggcgctcccttcagataatgatcgaagaactccatcattttgatcgaataatcgagcttgttggcgtaggtcttgggatggtggggttcgccccggtactggaggaagaagcagtccttccccaagcggcggagagcgaggtaaagctcgatggattggtaccagggaacggccccgtcctcgtcgccgtgcatcaggagcagcggcgtcttgatccggtcggcgaaaaagaccggggaattctcgatgtacagatcgcgcgcatcccagagagacgccccgatccggctctgttcgcgctcgtattggaattgacgggccatcccggactcccagcggatgccgctgtaggcgctggtcatgttgcccaccggggcgccggcgcaggcggcggcgaagagatcggtccgggtgacgacgaaggccgtttcatacccgccccaggaatggccgtggaggccgacggccttcggatcggcgaggcccatgtcgatgagcttccggacgcccggaacgaggcaatggacggccgacatcccgggccggccgacggtgaaccggatgtccggcaggaagacggcgtagccgtggccggcataaaccgggaagcaaggccggtgattgaccacgatctcgttgaagtcgtacagccggtcggacgaaatctcgtaataatagaccaggacgggatagcggcgtccgggctcgtagccgccgggcttgatcaagacgccctggagcggccggccgtcgtcgctcgtccactccaccagctcggcctccccccaggcgaattcgctgatctggggattcgcctcggagatcttgcgggccggaccgaaggcggcgtcggtcgtccagagatcgggaaactcccggtaatcctcgcgggtgaacaggatcgtcccgctgtctttcgcccgggctttgaaggtgaagttcttgcggtcttccaagagccgggtgactcccgacgttccggcgatggcttcgtaaaagccgcggttcttgtctctcaggtgggtggaggcaaggagaaggcgctcgcttttccggatgaattttcgctccgggtcgggaagaatgatccggaacgaccggttctccttgcgtccctcgccggccgtcacaatgtccggcgatcccttggggccggtggggaacgcccagatgtcgtgcctgtcggggagaaaaaccgccgcgtcgttttccatccagaccgggtttccataagccggcgggggggcggggtggtcgtcgtcctcctcgtagaaagcgaccggcagatcttgggtcaggttccggatgaggccggttttgacctcgagaagaaaccagtgcttgtcctggaagtaggcgacgtacttcccgcccggcgaaaggaacggccgggatccgaaacgagtcaggattttgcggcgttcgccgcttgaaaggctcaccaggtaaacgtcggcgtattcgccgtcccaggtgatctccttttgataggggcgcccgtcccaccccagggcgacgtccggattatcggggatccggaatcccgccatgtcgggcgaggccaagagaatggtccgtttcttgtcgggataaaagacggccgtgtacgtccggtccttgttccgctcccactcctttttctgttggggaatgatcaggaggtcgtttccatgccagacgtcgacggcccgcttttccaagatcgcggggatatcgaagacctcggccgcgggcggagcggcgtcctccccggccggggcggcgggtttcgggagctcggattcgggccgaagcccgaggaacaggcgtttcccgtcggccgaccactccaggggcgacttcacgggaaggatccagccggccggggccgccggcgcgacctcgtcggccgtatccgagccgaatacgtattcccagaggacgagcgacgcccgtccgggatcctccttgtcctttttcaccgcggccgtcagagccatcttcgtggaatccttcgcccaaaccggggcggaaaccgacgccttctccttaagataaaggacggtctcggggatcccgcttctcttgagatcccggacggccaggccgtttttccggccgtcggcggccgataaaacgacggccaggacggtggatttcgggtcaaaggaaaaggacaggacgtcctcgagcttgaattcctcgcccgattccaggttcctcaggaggaccggccggccggcgtcccaggccggcggggcttcctttttcgcctccccctcggccgtcggcccggccggggcgggtttttcctccggccggaagaagccgatcgccagccagcggccgtcgtcggagaaggcgaattcctcgacgccctcaaaggcttccatcttgccggtcgtcaaatccaggaaggccatcccggttttcggccggtccttggccggcttgtccatgtcgacggcccggatttttacgatggccccgagccggcggctgtccttgctgaacacgggccgctctccgcgcttgagggaaaaggattgcgccccgtccgtcgaccggacctgcacttccccgtcgccgcggtcgggctggagggcgcaggcgacccaccggccgtcggcggaaatcaccggatcgacgatccggttgaatttcatcacatcggagaaggtcagcggcttggaggccgcctgtccgtaaaagaggccggccgaaagcaggctcagcgccaggaggaaaagaatccggcggccgaagcggaaacggggcatgggagtctccttcgggagggatgcggaggaaaaaaaagtcgtcctcatggaagaaaaaacagattatcacagcccggacgtttcttcaaagcgccggaaagacttgcggccggagacggcttcgtttacgatggcggcgatgaccccccctctggatttctatgagctgaggaaacggcagaagatccgcagcctcgccgtcgccgccctgctcttcctcttttatttcctggccgtcgggcttctcctcctcgccgccgggctgacggccggcttcttcgccgtccggcccgttttcgccggctcgggattctggacgaaattcatcgttctcgacgtcctcctggccgcggccgtcgccgcttttcattatctcgacgcccggaaaaacgggccggcttacttgatcaaaaggctttccgccaagcctcccgatccggccgaccgctaccaccggatgttcgccgacgccgtggccggcgtccgcctcgcggccgggttgccggcggtcgatcccctgattctcccgacgttttccctcaactcgctcgccttgatcctcccgggcgggcggccggccgtcctggtcaccgaaggcctgttggccgactgcgcccgggatgaagtcgaggcggtcgtcgcccacgaaatgggccacatcgcccggggcgacacgacgctcctgaccctggtctgcggcctttcctcttttttcgagcggctccgggacgcctgcgagcccgaggtcgaggaggccgccccggtcctcggccgaagaaaccggacgggcgcggccgccggcttgctgtacgccgcctccgccgcgggggcggcggtcatccgttttctcgaggtctttgtctcgcgggaacgggagcttttggccgatgccgcggccgtcgaattcgggcgcagcccgatggccctggcccgggccgtttacaaggcccaagcccgaaacgtcttcatcggcgatttcagccaggccttcgccccccttttcctgatcgcgccgtcggcgccgccggaggacggagcgaaagcgccccgctggtcaagcacccatccggccttcgaggagcggatccggcttctggccgccatggcccgccggacgcccgaggccgtggccggccaggtgagagacgccgccgaggcgcggaaaaaagcccggacgatcgcggccccggccgcgccgccgacggccgggacggagacggaagcgccgccggaacgaagggactggatgatgatccggccgggccgcggcgaaaccggcccggcggctctcgaggaattgatcgaggcggacggattttctccgtccgtcctcgtccgaaacctggccgacggcttggacggccgggccggcgattttccggaaatccgggacgccctccgtcggagacgccagggccggcccgtggtgatgcgccgcctcggcctctgcccccgctgccggattccgctaggcgacaccctttatgagggcgtaccggccggcctctgccgccgctgcggcggcaaatcgatcgatccccggttcatgaaccggatcatcgcccgccgggagatcgggttttcggccgatctcgttaaaaaagccgaagctttcgagcgggagcgccttctcaatcccgccgcccggaggaaatccgccgatccccggaaaacccgcctgatctgcccttcctgcggctgcccgatgattccccggccgttcaactatcaatacgtcgtccccgtcgacaaatgcggctcctgcggccggatctggttcgatgccgacgagctcgagaccctccagatcctcatcgagcgggcgcggacggatgaaaaggagagacgatgaaaccccgcatcattctgcacaacgccgtgagcgccgacggccggatggattggttcgaggcgaacctggagacctattacgagctggccggccggttcgacgaggacgtcaccctggccggcagcgggacgatgctccaaagcccgctgggcgaagcgctcgcccgcgagccggaggaaatccccgaaccggccgagatcgatccggccgatgcgcgcccgatcctggccgtcccggacagccgcgaccgcatcaagaactggacgtccctgcggacgcttccgttctggcgcgacgttctcgccctctcgtcctcgacggcgccgccggcccagatcgagcggttcaagcgccagggcattccttatttcctggccgggcggacccgggtcgatctcggagcggccctggccgcgatcgccgggcgttacaacgccaaaacgatccgggtggattcgggcggaactctgaacggggttctcctccgccggggcttggtggacgaaatcagcctccttgtccatccccggctggtcggcggaatctctccccggacgattttccgggccgacgacctgacgtcggccgaggacgtcatccgcctggagctgacggccaacgagacgctgtccggcggtctcgtctggcttcgctacaacgtcatcaccaaacggcctcccggccttccggaagattgaccgtccccccgttttcttgacaccacgcgcgggccggcgatatagtggcgccatgagcgggaggaaaacaaatccgcgggccgggacggacggccgatgaatattctcgtcgtctccgatacgccggaaaccttcactcttctcgaaaagaccgtcgtcccgaaagggttcacgatcttctattcctccaaccgggacaacatcaagtccgtcatccgccgccgcgggatccggatcatcatcctccgcctgtctccggaggaaacggacgaccttcggccgctgcgggagatccggaatttcgatcccttgatcgaagtcatcctggccggtcctccccttcccgtgaacaagaccgtcgaggccgtgaatctcggagccgccgattacgtggtcgagccgttcgacggcgaggacatcctggccattctcgaccggatccgggagaaggccgacctccggaggcaaacctaccggctggagaaacagctggccgaaaaatacgtgttcgagggcatggtcggccggagcgcggtcatgctcgagctgttctcgctgatcgagcggctggccaagttttcctcgcccgtcctcatccagggagccacggggaccgggaaagagatggtcgcccgggctctccaccgtctgagcccccggcgggagcggaagctcgtcgtctgcgactgcacctccatcccggaaagccttttcgagtccgagcttttcagctacgagcggggggcgttcaccggagccgacaaggcgaagcccggcatattcgaggacagcgacggcgggaccctgttcctggacgaaatcggagacattcccccgatcatccagacgaagcttctccgggttctggaggagcaccggttccggccgctgggctcgaacgcttttatcgagatcgacgtccgggtgatctgcgccacgaacaagaaccttcgggccttgatctccgagggattgttccgcgaggatctcttccaccggatcaacctggccgagatcaacctgccggcgctccgggaacggcgggacgacattctcatgctggccaatcatttcctggaaacgagcagccggaaattcaagaaggacgtccggggcatctcccagcgggccaaaaggatcctggccaattatgattacccgggaaacgtccgggagctggaaaacctgatcgaacgggcggtcatgctgagcaccgaagcgttcgtcgacatcaaggacctcccggaaccggtcgtcatcgcctcggaacgggcggaaaacgacgagcgcgaggcgaggccttatcccttcgccgaaatgactcttgaggatatcgagaagaagcacatcggcgagattctcaaggcggccggacataacaaggtcaaggccgcgaaaatgctcggcctgacccggccggctttataccgcaagctgaaaaaatacagcttatcctgatttgactcctccggccggaacatacggcgccgcccgcgcgaaaaacctcggctgattccggcgcttcgcgaagcaagaccgccgggggggattcttcgctctcatggacgcgttcgagcccatgaggaccgggattcggcgaatctccaaggggaggccccgcttttcccggcaaccgtcccgcctcctcgaaaatgacagccaagaattaatcagatccttataatcggccgggcgggtggcggtttcatttagtgaacaaagcggattatcaagaatattgtaatcattatagcgtttttaaggtaattaatgtaacattatcgtacatgtcgacaaaattgcaattatttatttatatattaacgttttatatcgttttaatcaaatttaatatgtacgataacggacacttcggttaatttaaaatttctatatttctttttatttcagctacttaatatgtttttatctctggcatgactattgctatatacgaagtcgatatcaaaaatgaaaccaaataaaggctccgcccgacgcaaagcggcctccttgactctcttcctcgctatgatgacaggggcggcttacgcggtctccccggaaacggggacgtcgggcgcggtgtctttctcggtcaatctccgggaatggtttgtcctcgaggttcaaaccccggacgttcacatggaatcatcgggcgtcgccggggccggcgtgacgacgacgatgagcccggacgggatccccgcccggatcaaggccttggccgtcgtcgctcataaccaggccgtcgagctgaaggttcaagttttcggcgacctggtcggcccctcgggcgaaacgctcccgctctccgacgtgacctgggccggatcaggagaaggattcctgagcggccggttcactccggccggctccgccgtcctggcccgttggatgggaccgggctttcatgagggaacggttcaatatttctcgccccaagcgaatgaaacaggccggaaatacgttcagcgcatcgtttacagcttgatgtcgacctaaaatccgcccgccctcgtttatcactccactcagcccaagataatatcgattatccaattcataagtgacaattattgctttttgttgacaatttacgtcattatttttcaataatactttgatcatattgcaccccctttttcgcatcttattgtatttattatatttaaattattggcatataacatgctataattagaggtgtaacgaaacagattcttttctcatagcgaggaagagagtcgaaattcaacaggaggctgatatgaaaaaaaccctgacgatcctgagcatggtcctgctggcgtccgtcggcttgttcgcccaggccacgaaaaacctcgacatgaccgtgaacctttccgcctggtatgacctgagcttgggcgccgcgtcgatctctttcaccgacgttgccccgacggccgcggcctcccccgcctccgtttcgctcgaagctaacgagggcgccgttttggtccgggctttcgccgtcaccggaattggaaaaacgctgaatctgacggtaaaagccaacggcgacctgacttccagctccgacaccatcgggatcggcgcgatttcctggaaggcgaccggcaccggttatgtcgacggcgcgatgtcgacatccggcaatatcacggccggctcgtggtcgggttccatccttcactggcatgagggctccttcacctactccttcctccgcgattacacgacccaggccccgggcgactacaccgcgtccgccacgtacacgctgtcggcggtctgaccgggttaatcaagatcgataaagaccatgatccgagggcggggcgaatccccccgccctctttttttgcccggcgcggaacgattgcccgggctccgtttttcacatagaatagacgggggatgaggatgagcggcgcaaggatcggcttcaggaacggaacgctcttttggctcgcggcggttcttctggcggccgcgctccccgcccaaggccaaatctatttcgggatctcccccatccgggccgagcaccggatcaagccgggcggaagcctgaccgaggtcttcctgatccgcaacaacgacgccgggcccatccggatcaaggtctacggggaaaactggacgatccgcgacgacgggacggccgccttcatcggcgagacgccaacgacgtattccagcaaggactggatcgtcatcaatccccaggatttccggatgaatccgggcgagacgaaatccgtccgctacacgatcgccgttccccccggcacgtctccgggcggatatcactcggcgatctcgttcgaaaccgtgcccgacgcctccgcggcccgcgccggcaaccggatgctcttcaccggcaagatcgcggccgccgtctacgtgatcgccggccgcccggccgtcgagggcgatctggtcgatttcaccctcggagaaaaaaacggccggccggccttcctcctgtcggtggaaaacaccggccggacgcacttccggacccggggaacgatccgggcgttcgccgcctccggagaaaagctcttcgacctggaaatccccgacgacgttctcctgcccgaaagccgcaagaacatcgcctgccctcttccccggccgctcgacccgggatcctaccgcgtcgtctgcgatctcgacatcggccggccggagctcctggaaatggaaaaaaacatcgaggtgatccaatgaaaaaaccgatcgccgtcttcgccctgatcctggccctggccggcggcgggcttctcgcccagtctcttccgctgacggaaatcctgaatctcgcggccgaggtcatctcgcgctacaagctcgagatgagcgccgcctccgtgacgttcacccggaccgccaatccgcagacaaggccggacatcccccagaacgaaaaccctatttccgtcaccgtgaaggccacgacatcccgctttctcatcttcccccagacgatcaacctccggatccaagcctccggaacgctcatcgatccggcgaccggaaccacgatcccggcatcggccatcacctggaaggcgagcggcacgggattcgccgcttcaggaactctctcgtcggggacggccaccctcctggggacatggaacgcctcgggggtgtacgtggggacggtcacctttttcttccgggacgatcccaattaccccccggggacctaccgcctgaccgtgacgctcagcgtcggcgcgagttgaggccgtcatgttgaagcccgcgaaagccacgatttttccggccgcgatgtttcttttcctggccggagcggccgctccgctgttcggccagaacatcgagctctctctcagccgctccacgctctccttccccgcggccgatcccgatgcgacgcccctcgtcccggccaacgacacgctcacggtccgcctcaaactgacgggaggaggacggcccgggcgttggcagctcaccctccgggccgacggcaacctcatcaacatcttgtccttaacctcgatcgacatttccaacatcacctggacggcatcccccgcgccgccgttccggaacgggaggctggcggccaacgtcgaccaggtcgcggcagagggagacggcaacgtcaacatcaccgcggttatgaatttcgtcttccaaaacagttggtcctactgggccggatcctatagacaatccgtgaccttcaccctctcccgggtctgatatgagcaaactgaaaaccgccgtcgtttttctcctctgctcggccgccgcgtccgcgcttcggggacagatgtcgctgtcgctctctccggttcacttggaattcaccctcgccgccggaaactcggaggaacggacgctgaccgtcggcaatgattcgccggacgacatccgcgtccgggctcgggtcaccgcctggatccacggtccggccggcccggacattccggcggccgaagacgcctctttatcctccaaggattggctgggcgtcatcgccggggatttccggatcccggcccgccaatccctggacatccccgtcatcgccgccgtcccccaaggcgccgaaccgggacagtaccccgccgtgatcgccgttcaatccgtatcggacgaggacggcgaagggcttcatctccaaggaagcctgaccgccttggccgtcatcaccgtcgggaagccccgggacgatgaaacgagcgaggagatcacggtcgagcgccgggacggacaggcttttctcgtccttcatcggaaaaatacaggccgttttttcgccccgaccgcggggacgttcgtcctccgggacgaacggggcacaaaagcttgggaaactgaattcgccgacaatcccgtgcctcccctgtccgaaggcatctaccggattccgctcgcctccggcttggcggccggccgctacgaggccgaatgcgtcctctaccggctcaccgggaaaaagaccgtcctgaaaaaagccgttttcatcgagtgagcgagaaaacgtgaagagggacctccggcccgcgatgcgccgaaccgtttcgctcgccggcgtccttgtcctcctggccgggctcgcccccgccgcccgggccgaccggggatcagccgatctttcgatcggcaaccggagtcatctcttccgcaatcctttcggcggcgcggacgacgcctcggagaccgtctttcacttcggcctcgtccaggcgatcaccaattacgggaccgtgtcgctctgggccgacggcctggcggccggcggcgtcttcacgcccgcccggctgttcgccggctggcggggattcaagatcaagaacgcggagctgtccgccggtctcggcgacggctttttcgtcaattccaatctcgaatcccggttcgtcaatcagtatcatccgtatttttacttccggggattgaatgcctcgatctccgggccggccttcgatctctcggttttcggggggacgctggcccggttgaccgggctcctgggaagcacgtacgagatcaaggaccagcctttttacgggatccggggacgatggaagcggccggccggcgggctcgccggggccgggatcatccacacccgccgggatccggccgatccggccggccccgaaaaaaacaccctgatcctgcttgacgccgaggcccccgtcgccgaaggggcgaaaatcctgggggaatttcaaacgagcctcacgcccgggtcctccgggccggccggatcggccaacgccctgcgcttcggccccttcttccggtcgggaaaatggaacatcgaggcgaactaccgcttcaccggatcccgtttttgcgacctcaatccggattatcagtccatccgcgacgagcagggcctcttcgcctcggtccgctaccaggcctcgcgcaacctggtcctcttcggcttcgccgaccgcttcgccgacaacaccggcggcgatccggccaagaacaccctccgctccctgtcggtcatttccggattttacctcaacacccgctcgctcttcgacctgtccctccaatgggaattccagcagcggatttcggaacacgactttcccggctcggtggatttcgcctccaacggaatcttcctccaggcctcccggacgatgggcgactttttcccctatctccgggtcaagctgcagagcgtccgcgagggccccggccttccctcaagcggcctgcccgtcatttatctcggcttccgaaagaggatgccccggggatcgtttttatgggtcgaggggcaatacgaccataagcggaacgccgaggccggcctgatcgaccggaacctctacgtgcggacgggttggaaccaggttttttcccctgatttcgacctttacgccgagcttttctatgagcggtacggggccgtccagatcgtctctcagatcgtcgcctacgtcggcgtccgggtcggcctcggccggagcctccaggcgcgggccgacatccgggcgtccgagccgttgaaccggagggacatccgctcgtcggactaccaattcaccctccgcctcgacaagcgcttctcctggggccaagagcctaagatcatgggccgcaagaccgtcggggccgtcctcggcatcgggtcgatcgaaggatacgtgttcgaggacacgaacggcgacggcctcatgagcccgggcgaaaagggattggccggggtgtccctccgtctcgaggacggatcgcgggcgatgaccggggaggacggacgcttccgcttcccgatggtggccgagggcccgcaccaggttcagatcgaggaaaacctcatcccggcgacgtattacctgctgagcccggcccgggtggacgtcttgacccaggctcgaatcacccgcgaagtctcctttcccctgatctcgggggcctcgctcaaaggccggttcatcgaggattccgaccggaacgggaccatggatcccgcggacaaggggctggccgacatcctggtcatcctgacccccatcgacggagccgtctggaaggacttgatcctcaacacctacaccgacgccggcggcgcctaccggttcatgaacatcctccccggggaatacgagctctcggtcgatccggagaccttgccgaccggggcggtcacggccgtcccccttcccttcaagatcaagctcgagcccggccggacggccggcggagtcgacttcctggtgatcccccggccggtcatccggaaaaaataatcagtccgcgatcgccccggcgacgatgttggccacccgggcgcggagcggaacgatcgtccccttgtcctcgggatggacgctgttggtcagcaggacgacgatcgtcttggtgtcgggatcgatccaaagcgacgtgccggtgtagcccgtatgcccgaacgaccgcggcccgaacagatcgcctccgttggaggcgtaatccgagccgaggtcccagccgagcccgcgtccggagaactccgtccggggatagatcgacgtcatgcgctccacggccgccgggctgaaaatccgccggccgcggaactcgcctttgttgagaagcatctggccgaaaaccgctaaatccttggccgtggaaaacaagccggcgtttcctgagaccccgccctgcagccgggccaggggatcgtggacgatgccgagaagcggcttgccgtccaggatctgggtcggaacgatttgggcggaaatcttcggatcgggattgtaaaacgtccggcgcaggcccaagggctcgaagatgttctcggcggagaaacggtcgatcgacaggccggacacccggcggacgatctcagccagggtgatgtatcccaggcagctgtagacgaatttttcgcccggcggattgtccttgggcagggcggcgatatattcggccagggccgagggcgggcagggccggccgcacgccttggccgcgacttcgggctcggcgtaggcggggaggccggaggtgtgagtcaggagatgccagatccgggcgtcctcgccgtttttaccgaaccaatcccggtacggaacgaaggaggggatgtatgttttgacccggtcccagaggctgaggcgcccgctctcgacgaggatcatcaccgaggccgccgtggccacgggcttggtgagcgaggccaggtcgaaaatcatgtccttctccatcggccggcggtccgggagccggcggctgtcgccgtaagcctcatgaagaacgatttttcccttgcgggccaccagcaggaccgccccgggcaattccttccgggcgatcgcctcctggatgacggtcgacacccgggccaaccggtccgcatcgaagccggcgtcccggaccgtgccgccgggcagggaccgtcgggcgcaggccgccccgagaaaaaccaggatgatcgccgccgccgctgcttttttcatcggatgcctcccagggcccgcccgatcctcccggccgcctcccgcaggacggaatgcggacaggcgaaattaagccgggcgaacccctccgtctccgggccgaacatcgccccgtcgttcaagtatactcccgcctcgcgcagaaggaactccttccatcgcgccggggccaggccgaggccccgcccgtccaccaagcccaggtaggtcccctcgggcttgaaaaaccggagaggcgcgaggcgctcgtcgaagaatttccggagcaggtcggccccctcctccaggtagacgagaagggcctcgagccaggggccgccgtcccggtaagcggcctccatggcaaccaatccgaacacgttgggaagctcccagccgaaatcccggaattccttccggaagccctcgcggagggcccggtccccggcgaccgccagggaggcggccaagccggcgacgttgaacgtcttgctcggagcgataagagtgatcgtccgggcggcgatgtccgggccgagggtcgcgaagggaatgtgccggaagccgcgaaagacgagatccccatggatctcgtcggatacgacgatcaggttccgttccaggcagatctccgccagccgccgcagctcctcctccgtccacacccggccgaccgggttgtgggggctgcagaggaggagcattttgacccggtcgtcgacgcgccggcggagatcgtcgaaatccatcatccagcggccgttttcaaagcggaggggattgcgcaccagccatcgccccgacgcttcgaccgccggaaaaaacggcggataaacgggcgtctggatgaccactccgtcgccgggcttggtgaacgcccggacgcaggcgtaaagggccgtgacgatgcccggcgcgtaggagaattcccccggatgaacgtcccagccgaagcgcgtccgcagccagccggccgccgcctcgcggacggacgccgagtcggacgggtaaccaaaggccccgtgggccgcccgccgggcgacggcttcacaaacggccggcggggcggcgaaatccatgtcggccacccacaggggaagagccccgggggcgttcagcttcaggaccgggaagtcccatttcaaagaaccggtcccccgccggtccaggacggcgtcaaaatcgaatttcatgaatccttccggacgcgcccgtccggcccgatgcgccagaccgcgccgtccggcctggtgaaggacgcctcgaaaagccgctcggtcgcctggagaacaggcggagaaacgaaacccgaaaccttgagctccctttcggtcaagccgagagccttcaggtccgccgtgaacacgcctttctcggcgaagtaagcccattcccggtaatagattcggcgcagggcccacttggctttttcctcgggccgggcgacgaaggcctccttccccttgccggcggttttttccgaaaactggacgaatccccacaattcgggatagtgaatgttgaccagccccatcggcgaccaaacccagttgtcctcgggataaggattcccggtggccggatcgacggccttgacgattgttccgccggttgtcgtcgtccggtattccacccgggagaaattgacccgccactggtcgcccggcttaggcgcggccgccggctgggcggcttccttgagcacggcccagggaagggccatctcgacgaaccagctccggtccttgtccgccggattgttcaacgttccgttgaccaggacgccggtctgcaggccggggatctcccaggaatggatgttggccggccggccgtcccggtagggattgacgagaaacaggtcccagacggtgttgagggcgttgatctccagctcgtagtaatcgtgggtgtcgccgtcgggatcgatgaagacctcgaaatcattctcctggtagatgatcgagtcgtgggcggcgagcgtcgcccagacgttcggttcctccaggtaagccccgatataaaaataccggtcgtcccataacatcttggccatcgtccgaaaccgcggcttcggacgccggccgccctcgatgtcgacgaagggctcggtccagggagctttctcccagaccgcttcgtccaggtttccgtccaccgtcaccgggccggccgcccggtaacagacataggtccggggatcaaaggaaatcttcggttcgggaatccgcggccgttcggccgcgagcgccaacgacatcgcgagcaggagtccggcggccgagccggccctggataaaagcgtttttcgcatggcctcctccatcgggaagaagccattttagcagaaatgcgtcgattccgaagccttaaaatccctgccagaagctgaaagcgaaatgccagccttggccgggacggtcaagcggcttgacgtaatcgcagccgacgatgaaatatccaaagatgttcgcccgcaagccgatcccgtagctggacaggggcttgcggtcgccgccgaggaaccaggccttgtgctccttgtcccaagccacggcgctgtcgaaaaaggcgatgaaatcaatggggaagactccatagtaccccttgcccagccccagaacgccgaacagcgggaaacgaagctcgaggttggccacggcgatgcgcgacccgaacagccggtcgtagtcgaacgtcccgcttttcatatcgacttcctcggccgtgaagctgttgtactcgtatccccggacaagcgtcccgtacccgagatacatcgggtagaggcggtcgtcggcgctgccggccccgtagcggccgtagtgaaggacccggaaggccagggtgaagggcttgaagggaacgacatacttgcggaaatcggccagcaaggtcgtgtaattaagcgtcccgaacgtcggggagacttcgaaacgatagctctggccgatgatcggcgcggtcgccccgaacagagacgtgtcatagaccagggcggcgctgacgaacggcatatggagcccgtcggccgccgggagatcgaaatcctcgaaggagaggcggcgcccggtataataggaatatcccgtccggtacagcgagttggagaactgaatgtagctgtagccgccctggaattcgacccgctgggccggactgaacgggtacgtggcgaatccgcccaactgataatagatctgccggtagatgagctcattgatgaaataggccggctccccgccgatatcgccgtaatcgatccagtatctcccgtagctgtacggcatccgctggcccaggaaaccgaaattcgtccggcttttgctgttggtgtagaggccgatgacggccgagtcgatgagccggttggacagctgggcgatgcccgtcacgttgtgctggccgagcatgtcgctgaaggtcatggcgatgccgccgccggcgtaggagccgaaccggtccatgccgatgccgacctggggcggcgtgatgtaatccagggtgatcttggattcgtacggggcggaggtgaacgcggagtcatccatcggcagtccgaacagcgagttgcggagaaggcccgtcagctccgagcccgcccgggccttgggagggaggatcgccgaggagcggtcgaccgcctccgggccgaccggcgtcccggccgcgtcccggccggcgttgatccggtagatgctgtagatgccgtcgtcgtagacgctgtacaggatgtcgtcggtttgggaggcgaccgtcagggcggggctcagggcggtgatgccggagacgccggtatagagattcgtaatctgatagaaccggcccgtgttccggtccaaccggtagaggttggagacgccgtcccggtcggagacgaaatacagctgccgcccgtcggccgaccactgcggcgagatatgcttgccggcttgaaaggccggcagctcccggatctcccccgtctcaggatcgaggagagccaggtggaatccgcccgagccgaccagggagaggtcggaggcgaaccgctcggtgatgaaggcgatccattttccgtcgggcgaccaggccggttgaaggtcgccgtagggatcggacgtcatgttaagaagcgtttgggtttccaggtcgtagatgaagagatccgaacatcccccggtcaaggcggagaaagcgatcttccggccgtcgggcgaccacgtcggattgagaatctcgcccaaatggggaaagacgatgtcgtccttgagccgccgccccccgacgtcgagaaaagacagggcgggtttgccggcgatgaccgatccgaaggcgaattgcgtcccgtccgcgctccaggacccggctgaataaataaactggatgctctggaaatgggggtcgatcgaggttttcgtcagcttccgggtgatttttccggtgagggcgtcccccaggaacatctcgatcgagaacaggtcgcgcgaggagatgaaaacgaaatgcttcccgtcgggcgagatcgccggggcgcaattcagggacacatcctcggtccccttgaccaccacttgggccttatccagcgggccctcggtggatttttcgatcaggccgtattcggctttcaacgcttcgtgccagtccttggagaattgctccggagtgacgcccaagacccgggtgaaggctttccggtagtcgtagccgcggaccacatcccgcatcagcctggcggccacaaggtccccccaccgccctccaatataggcatagaccgcctggccgtaccggtaggggaaatacttgtagtaattttccaggtccttgagggccgggatctttttcctccggatcatatcccgcatccacatggccgtgttgggatcctccgggccgatcgaaaagtattcggccgcgccttcgatcaggaacagcggggttcgggccagtccctccccgccctgcggattggcccggccttcccctcctaaggccatgtcgtactggaaggcgtggacgagctcgtggccgatgacgtgatccgtgtcgtccagggaagctccgaagggcaggatgatcctccgcttgaacgattcggtcacgccgcccgtgccctcgctgatcagctcggagaggacggtcgtctgctcgaattggggatggctggcgtacatgatgagggcttgcttgcccttgagatcatggttgaagatccgggccagccggttgtaccagcgctcggccatgcgggcggccgtccggacggcggcttcctcctccggatagtagtaaatctgaaaatgatcggtggtcaggacctggtaatcgaatttctcgtattgaaccttgttccggccgaaatattgagccgaagccgtgacggccgtcgctccgaaaatcagcaggaaaacgatccggcgaaaacggacgcccgacggcttatgttctccggttgaggatttcatgggaactccttcttcgcgaccttctttcgcgccatttcatcttcgcttacggctaacgaattgtcaaaccggttttccggcctaaacgttgccctatggataagttatcaagaatcatgccaagcccggtcccggcgggaaaccgaagaaaaacggagccggacgtcctctccggaggacaggctgtcatctgaagagacttccggaagtcgccggcggcccggatttttcaggagccgccgagggctccgggaaagcgccggcctttttccgaatcgccgggaaccggagccggaggatgaccttgggaacgatctggttcgattatattcagcaggccgtcctcccgaggacaggcttgaggctgttttttcaattatttcgtccccgcgtgattttaacgaaccggcgcaatcgattttgagtaaatccgccctgggcataatcaatcaccgcgtccataattttccgcccgaaaaaatacgccctgtagacccggctcttttcgtgctcgaaccggccgtgatacgggcagatctggcaacaataaggaatgacgccgcgggcgatcgcccttcgaatgcggcgggctttccggctgttccagatgtcctcgaaatcatttttggcgagattcccgatcttcccgcccggccggatgatgaaacaacagaaatagcagtctccgttcacctcgacgagaatattttcccagggcttgcggcagggggaagcggtttttctcattgataatatccggaaaattcggcgacgaactcgattccacggctacgagccttcagccgggccgtctcgacggcttcccggaattccggctctttgacatcgatcatttgatcgtgatagcggaaaacgaaatccccgttccgtacctcgtaatctttcgtcggattcaggaggccgaggtgaatgatctcggctcccaattccccggccagatcgacgaaggcgacgatctccgcggcgttttccctcatcaatgtcatgttgaccttgatcttcggacgggagactcccgacgcctgtttcatcatcgacaaccgcttgatatttccgatgacgagatcgaaatccgatcgccggatcttccggtaggtttcgcgggtcgccgcgtcaagagaaaagtcgatcatattgagttttttggagataaggatccggctcatttcctcggtcaggagcaggccgtttgaatcgaattgaacccacgtcttgtccggatccgtcttgtcgaggagagcgaggagctttttcccgagcaacggttctcctacgccatgcaaagagattgtcttaaatccccgcatatagggtaggagcttttggacggccgcgtcgcagatatcgccagagaagcctcttttgtcaaacagccggggatagcacatgacacacggaggatggatgttgcaccgggtgcaggattcgatttctaaaattgaaggcaacgatgcggcgaagccacgggagataagctgtttcttccggcgcttcttcatgaaaataaatctaattgagcattaattattcttggccgaaataacgcaaccaaaggataggaatttcgtctttcaaccggtcgaagccgcgagctttgtcttatcgcgaaattctatccaccccctcggaaatgagaatatttgatcgggcgaggcctgtcaagctatattaaaatcttactcaagagggcattgtcttgctctccaaaaaccttatcgcggccgaagatcgttgagagatcataaccattttttctgcacgatctgggcattatcgtatttcttgcagggccggcttcggggaaatccgatgtcgcgatcatggcaggaggcatatttgaagctcttgaggcttgacgatatcgtttggacatggattccatgagttccctccggctgtgaagatccatcctccggcctcctcaggcaaagagaggagggtaagattttagatggcgcgattcgtttcattgacaggaacccggacccgggttacgattcttcccttcgattccgccgatccaaggaggctcggatgaaaaaaacgctcgcctgcgctttcgccgcaatcctgatcacgctccccctcctcgcggccgatcaaaccgccgcgaaggacccggggaagaaaacggagggaatcggcgccggaacgttcgccggcctggcttggcgttcgatcggcccggcccacacgtccggccgcatcgccgatttcgccgtcaatcccggcaatcccaagcaatacttcgtcggcgtggccagcggccacatctggaagactgacaacgccggcatcacctggactccggtgttcgacaattacggcgcgtacgccatcggctgtctggccatggacccggccaatcccaacgtcgtttgggccggaacgggcgaaaacaaccaccagcgggccctcggctacggcgacggcgtgtacaagaccgtcgacggcggcaagtcgtggacacacatgggcctgaagaactcccggcagatcggggtcatcctcatccatcccaagaatcccgacacggtctatgtcgcggccgaaggctcggcctggggtcccggcggcgaccgcggtctctacaagacggccgacggcgggaagacctgggccaaggtgctgtcgatcagcgagaacaccggcgtcaacgccgcggtcatggatccgcgcgatcccgacgttctcctcgtcacctcggaacaacgccgccggcacgttttcaccaagatcggcggcggcccggaaacggcgttttataaaacgacggacggcggcaagacctggcggaaaatcacgtccgggctgccttccgcccccatgggagggatcgggctggccctctcccccgccgatcccgacgtcatctacgccatcatcgaggcggccggggacgcgggcggtttcttccgctcgaccgaccgcggcgaatcctggacgaaaatgagctcctatcattcctcggggcagtactacaacgaaatcgtctgcgacccgaaggacgtcgacacggtctattccacggagaccgtctcccgggtcagccgcgacggcggacgcacctggacgcccctgggcctggacgcccgccacgtcgacgaccacgccctctggatcgacccgcgggacaccgcccatttcctcatcggcggggacggagggatctacgagacctacgacggcggggcgaaataccggttcgtgacgaacctcccggtgcctcagttttaccgggtgaccgcggacgattcgcggcccttctattatatttacggcgggacccaggataacaacagcatgggcggcccctcgcggaacaccagcgccgacggcgtcacgagcgacgagtggttcttcacggtcggcggggacggcttcgtctcccaggtcgatccgacggacacgaacatcgtttactccgaatggcagtacggcaacatcgtccgcttcgaccgccggagcggggaaagcttttccatcaagccccagccggccaaaggccagccgacgttccgctggttctgggacacgcccttcctcctttcgcctcactcccccacccgcctttatatcgcggccgagagggttttccggtccgacgaccggggcgactcctggcgggagatctcgggcgacttgaccgccgggatcgaccggaactcgatcccggtcatgggcaagtactggagcgtcgacgccgtggccaaggacgtctcgacctcgcaatacggcttgatcgtctcgctggccgaatcgcccctcaaggacgggctgcttttcgccgggacggacgacggtctcattcaaatcaccgagaacggaggtggcgcgtggcggaaggtcgaccggttccccggcgttcccgccctgacgtatgtgagcgacatctgcccttcgatgttcgacgaaaacgtcgtctacgccgctttcaacaacaccctcaacgacgattttaaaccctatcttctcaagagcgcggacaagggccggacctggatcccgatcgcctccggcctgccggacaacggcggcgtgcacacgatcatccaggatcacgtcaatcccgaccttctgttctgcgggaccgagttcggcgtctacgccacggtcaccggcggaaaggaatggttcgccctcaaaacaggcctgccggcgatcagcgtcaaggatctggccatccagcggcgggaaaacgacctggtggccggaacgttcggccggggcatctacgtcctggacgactacacgccgctgcggcacatcaaggcggacgacgttcggaacgaattccggctcttccccgtcaaggacgccgtgtccttcatccggacgtccgcgaaatacggccagggggcgacctacttcctcgcccccaacccggaatacggagcggttttcacgtatttcctcaaggaaagcccgctgacccggaaggaaatccggcagaagcgcgacaaagagctttttgacaagggcgagcgcattcccatcccctcgctggacgaacagcgccgggaagcggaggagcacaagccttacctccggttcaccgtcgccgacgaatccgggcggcccgtccggatcctccgggccgctcccgccgcgggcgttaaccggatcgtctgggatctcagctaccccctgcccgtaccggcccgggaaagcggatctttcgatccgttcgggaaggatccgtccggcttcatggtcatgcccgggcgctacacggtctccgcggccaaggtcgtcgacagcgtcgtcacgccgctcggagaaacccagtccttcaccgtcactcctctggccggcgtcaccctcgccgccgccgaccgggccgggctcgtcgccttccagaatgacgtggccgagctgacccgcgcggcttacggcgcggacgaggaaaccggagtcctggccgcccgcctcctccggatccgccggaccgcggccgggatgccgggcgcccccgacggcctgatgccggcgattcgccaggccgggaaaacgctcgatgagatccgcctggccctggacggctacgaagccaaagccagcttcgaggaggttcccccggccccgatgcccatccgcaaccgcgtcgaggaactgatcggcatccagttctccacgacctcctcgccgggcaaaacccaggtcgaaaactaccgggcggcccgggaggagctggagaccgtgatccgaaagctcgaggcgctcaaaaccgtggacattcccgccctggaaaaaatcctggaggagcaccgggcgccctggactccgggacggatcgtaaaaatcggagattgacggcccggatcaacgccggacaatccgggggaatcgcctccccgggcggttcccccgaaagagaggcggaaacccttcgacaaatcagagggacgggggttcttccggccgggcggaacgggtcatggacttgaaagcacggaagatccccgctagaatttcctcgtctgaatgaaccggccggctttttcgatagtcgaagggacaagagaaagaaaacgagcctgtccaagacagagttaaaaatgacgagggggacgatgagtcatagattttcgaacgtcggcttgcgtcttcccctcctcgcgccgctgcttgcccttccgcttcttttcgccttcggctgcaaacgggcggaggctccgtttctgttcatcgaccggctgaccgaggaaaacgtcgccgcctcgccgctgaagacggcctcccctccggccgattcgaaggcaaccggccgggaatggccggaatccatgctgaccaccgccgtggtcctcgatccttccttcgggaaaaatccctggtccctggagaaaacgctcgttctcggtccaaacgtcgttccggtcctgctggccgctcctcccaccgaattccggtaccgcctcaggattcctccccaaagcgttcttcggttcggatgcgggctctatgccgagaaaaagcaagatggtgcggaagatacggtttttgaaatcaagctggaggagagtccccatccggccgaaattttcgaggaaccgctgaatctcgacggcgcgcaaaacctccatcaagccgccttccgcgaaatcgatctttcagcctgggtggggaaaaccgtcacgatcgtttttcgaacccgcgcggcggaggttctcgaaccgaaagacgcccgggcgttttccgaaaaaaacggcttggccttctggatcgatcccctcctcgtcccgagacgggaagcggggaaagcggcggacgcgccgcccaatatcatcctgatttcgatcgacaccctgcgggccgaccatctcagcttgtacggctatcgccttccgacgagcccggcggccgaacgcttggccggcgacggcgtcctgttcacctcctgtttcagcggggcgccgtatacgttggcttctcatgcgacgatgctgacgggtttgaatccggcccgccaccaaactctttacatggccgatgggataccccccgccgttccgacgatcgcggaaatcctccgccgggccggatatgaaaccgcggccttcaccggcggaggccagctcaacgccaaatacggcttcgccaagggattcggcctgtacaatgagcgggccggaggcaatcaactcctcaattccgccgccaacgtccgccggaacgccgccctatggctggaagcccgcaaggcctcgaaatttttcctgtttctccatgcttatcagccgcacaatccctaccgctccccggaatttcccgaacgggctttctttctccgggacgatatgccctggaagagggtatcccttcaggatgtgctcggcatcggattcccccatttgttccggtccttgactccgcgggaacgcgagaacatgacggctctctacgacgtggaaatccggaccgtcgaccggtacttgatcggcccgctggtcgaggacttgaaaaggctgggcctatacgagaacgccttgattatcctcgcggccgaccacggggaggaatttttcgatcacggcgcctgggagcacggtcatacgctgtacaacgagctgatccgcgtgcccttggtgatcaagcttccgcggtcgcgcgaggcggggcggcgcgtccacgaagacgtcgggctcatcgacctggtccccaccatcctggccgaggcgggcgtggctgctcctccatccggattcgacggggtaagcctttgtccccttttcaagggagaaaaactccccgggcggatgctgacaagcttccttccggcgggattcgtttatgactttccgagccgggtcgcggtcctccggcggccgtacaagctcgtcctcaacggcgaattcctgccgggattccgcgaatactttactccccccccgccggagaggatcccgatcgaattgtatgacttggcggccgatccaatggaaaaaaacaacctcgccaaccgcaaagccgccgtcgtccgggagctcctgcccgtcgccgaagcctatctcaaggcggccatggagcggaccggacggagggagctcgtcgtcgacaagaagctggaggaagagcttcggtcgctgggctacctccgctgacggaacgccgccctaccagaccacgccgtaatcgtcgccgtaattgctcgatccgccccagaaggtcccgtgctcccggtcgaaaaagatcgcgttgatgggcccggacgtgtacttcttgacgtccaggcggtaacccatcgcccggagctcggcccggacgtactcgggcacctgctcgttgatttccagccgccccggaatcgccttgtggtcatcgaaggagttccgcatctggaaactggtgaaatgaggggcctcgcaggcctgctggacattcattccgaattcgaccatttccaggaaaaactggagaagattctgatcctgggtgtccccgccctggacggcgcaggaaagatagggaaggccgtccttcaggacgagcccgggcgtcagcgtcgagcggggccgcttgccgggaacgatgacgttgtacggattctcgttctcgtcgacgacgaagctctgggcccgctggctgaggccgatccccgtccggccggcgatgaccgccgggatccagccgccgctcggcgtgaccgagacgacccagccgtccgcgtcggcggcctggatggacgtcgtcccggtcgcgaagcttgccggatcgggatctttattcagagtcggctcatcggccggaggccaggcttccaggattttccggaaaggattgacctgcccctggaacggataggggtctccgggcttgatcccgggatcgttcctctccgggttgagaagccgcagccgctcccgggcgtagtccttggagagaagcccggccagcggctccgcgggcggataatagggatcgccgtaataaaaatcgcggtcggcgaaggccaggttcatcacctggcagatggtgtggatgtatgcggccgagttgtatcccagctttttcaggtcgatgttttcgagcatgttcagagcctggagcaggaccggcccctggacccaggtgttgagcttatagacctccagccccttgtaagtcgtcttgacgggttcctcgaggtaaacgcgccagcgggccaggtcgtcctctccgaacaaggcgccctgctcgttggctccgcggacgaattcccgtccgatgtcgcccttgtagaaacggtcataggcggcgtagatcgcctccttgcggctccggcccgcggcccgggcgtccttttcggcctggacaagcttgccgagcgtttcgaggaggtcgtcctggcggaagatctcgcccggaaccggcccttcccggttccggccggcgtgcggcagcatcaccgcccgggcgtacggccaggccttgatcttgtccttctcccgctcgatcgagtcggccgtgcctttttccatgggatagccctcggccaggctcatggccggggcaagcacctcctccagactcatcgtcccgaactcggccagcattgtcatcagcccgccgggagtaccgggcgtgacggccgcgagcggtccggtcgccggcggatggcgcatcccacgatcccggaagtacgcggccacagcccccgccggagccgccccgagggcattgacggcgatgacctttttttgaaccggatggtagatcagggcctgcgtttcgccgccccagctgaggacgtcccacatcgtgcagacggccccgagcatggcgcaggccgcgtccaccgcgtttccgcccttctggaagatcatcgccccggccgtggcggccatcggcttgccggtgacggccgcccaatggcggccgtgaaggaccggtttttccgttttctgcggaaaaaggaaaagggccgggccgccgacggcaacgacgaaaaaggccgcggccgccgcgatccggcgccgtgatgatagaaggcggtggtttatcatccctcctctccgttcgcccgggggcgttcgatccacggccgggatccggaaaagatccgggccggcctcacctgatgggaacagccgcgaccagcttttcgaccgccgggagaatggccagctcgagctcggccagcggctttttccattcggccagcgcggcctgccattcggccgactgcgaatgacggatcttgtgcttgcggaccagggcctcgatcgcctccaggccgacatgcgccgtctccgccaacccgcgggacagcggctcgatttccttgaggacgggagaagagggcaggagcggcacgatcaaatcgtgattcatccgccaggtctccagcatcgtccggagcgcttccgccgatccggcgtcgcgccggtcgaggaacgcggccgcgatccggctgaaatggcgggcggtcagggattccggcggaacggcatcgacgaaccgtgtgagcggggccagcgtcgtctggaccttgcccaccgtatggcgcttgtagcccttgagcggctcgacggcgtcggccagcagccggagcggtccgacctccatgttccggacgagacgccggagcagcatgtctttatttttaagatgggtcaagcccagttcttccagttggatcgaaagaggttccagccgccggtacatgtcgtccacgtcgcgggtgtcggccggcgaccagagccgttcggcgatggccgccgtccgcggccagatgcgcgaatcgatcgtctcgggcgagaccagctcgctccacatcgtcgcctccccgcccaggacgagggccgcctcggcctccgaaaggccgtgtccggggggaagagggtcgttcaggtagtgatcggccgcggaataacagagatcgacgtaatagccgttggagagcaagccggcgtatccccgccgggcggcctggacgagggcttcggtcccccgccaggattggatgacgacatccttggacagctccggctgaaagatctcgtcccagccgaccattttccggccgtgcttggccaggatctcgaacagccggccgttgaaataggcctggagggcggcgttgtcggccaagcccttctccttcatgaacgcctggatttcgggattggcgtcccagtgcttgccgttgttttcgtcccccccgatgtgaatataaggatcggggaacagcccggccatctcccctaagaacgcgtcgaggaagacgtagacctgggaattggccgggttgaaagcgggcagttgaacgccgtaggtccgggaaatccggtaggggccgggcgcgctggccagctcgggaaaagccgggaaccagctcgtcgaatgccccggaagatcgaattccggcatcacccggatgccgcggtccgcggcgtaggcgatgatgtcccggatctggtcctgggagtaaaaaagcccgtccgagccgagccggtggagagcggggaagaccttgctttcaacccggaatccctggtcctccgtcaaatgccagtggaggacgttcatcttgaccgcggccaggccgtcgaggttccgcttgatcacatcgaccgggtgaaaatgacgggcgctgtcgatcaaaagcccgcgccaggggaaacgggggccgtcctcgatttggacgcaagggaaaaaatatccatccggccctgaggcgagcaattgaagggccgtctcgaacccgtggagaatccccagatccgtcggagcgaccaggagaatccggtcaggccccacggtcagacggtaggactcatcctcgccgggcaggagctcgccggtccgctcgcaggaaaaaagcagggccgccccgctttcccctccttccgggaggggaacctcttttcggaggacgagccccgtccgtccgctgagccgctccaggaaccggtcggccgcccggcgggcgcggtcgccgggccggccgagcgctccgacggtgaacgtctcgctcagatggaaccggccttcggttaaaaggacggccgagggccggggcatcaggttgaggaagcgatgctcggcggcggcgtgcgtcgccgcgacgccgatcagggacaggatgaaaaaccgggggatgattcgaggcgggcgcatgcccgcattgtatccattctcccggcgggatgcaaaacacggccccggcgggccggcccggagggaaaaaggccgcttaatcctcgactttttcgacgacgatcgtcaagttggaaaccagggccgcgaccgtcccgatggccgcgaggacgggaagcagagcgacgccgacgagacccaccgtcagcgggatctccatgaacgtcttgccctgctcgtccttgaggatgatccggcggatattcccctcgtggagcagttccttgatcttgttcaggatgtcgcccccggaggctttgaattcctccgttctcgtcttggttttcgggttcgtgttttcgctcatggccgttgtcctttccatgattatctacggaaacgaagaaggaaaagttcagccggcgcttcctccgcctcctccgccgccgccccctcccccgccgctgaatcctccgccgccgcccgaggaataatgggcggccgccgtgctggcctgctggatggacgtcgccgcgctctcgatggatcggaccatcgaggcgatcgagccgatccctcctccggacaggaacgcctgccgggaggccccggcgtaccaggcgggcaccgccgcccgctcgtcgcccaggatgagcggcagggatttcaagatttttttcgcgttgccgaaaagaatgccgaagaccaggtattgttcccacagccggtaggcctccggcggcgtttccttgaactcggagaaatcgtcgaggaaccggcggagcgccttccacatttcgttttccctggcccatcggagcgagcgccgcttgatcttcgggatgaggaccgcgcccaggacgccgaggacgggattgaccgtcaggacggccgccggaacggtcgcggcgatgaaccggttccggcgcttgaggctttcgggctcgatgaaagcgagtgcttttccttccgccttgaccgcctcgccccaagcccgaaaccaggcttgaaacttggccggattctttttcaaccaggatttcagctcatcaagggaaaaaaccgtccccgcgggggaaacgggcgaggtgaggcccggatcgaccggaaggggcggcgaaacggcgccgccccgcgcgcggcggaagcgctcgagggctttggccgcgcttcccaaagccgcggccaaggcggcggccccggtgttgtcgacggctccgcccgcggccgccgccaggaaaccgaggatgtcgcgctcgaacggccgcaggccgtcgtcttcccctccgaattccttcttgaacgtgaaacgggtgacggtcttttgcttggttccgaagaagccggatttttcctcggtccggtcctcgatctcgaggaagccgcgccgggccaagtcgaagatcgtcgacgtgaaggccgccggcgtcaccgagatcccctccctctggaggaggtcgacgagggccggaggcagatcggaggggatttcccgaaaatagtccgggatgtccgtgaacgcgtaatctttgccgacggcccgccaagtcctcataaagaaagggagccagaggatcgggagggcgatgaggccgaaaagataagcttggacgagacgttcggtccgtctcgtccggcgggccgcctcggcttgggcggccgaggcccgggcgatcgtctcgtcgacgaaccgctcctcctcggcccggacggaagcgaacgtcaggcccgcgtccggaaggccggagacgatccccgccggccagaccatccggatctcgaccatccgcccggccggaaggttcgggacggtgaaccgggccgtctgaaggtcgacgatctcggaacgtcccgaaagcgggccgtggccgtagacgaggagctcggacgcgccggagacaggctcgggcagggagaccgtgacgaccgccagggaggccggtttgtcccagccgctcccgatcggctgccagtaaagctcggtcgcctcgccggacgtgcggatgccgccccggacccggtaatgaatagaaaacgttttccgttcgtcccgggcccgatagtaccacttggcctccaagcggtcccgcgagcccccttgttcagtccgaaggggcgttccgtcctcgaaaaccgcgaaatcctcgatttcagcttcgtacgtccggcccatccgctcgacccggagggggatccagagggtggcccaggaaaattcgccgtcgaaggcatacgtccggttttcgtcgaccgtgaagctcccgtcggcctcgaccgcgatgtcgatccggacctcggggaaatagaaatccttggccgcggcccggggaggatggagagaaaccgccccgatgaccgccagcgacacagccaacgcccgaatcgctcgttttctcatcttcacgttctccctcctctttttaccctaccaaaggaaatcaggagacacaatacctgttaaccttatttcaaacaaggggaaacgcaagccccattgtccccgtttcggaagatcggcggcgggaacgagggaacggatcgggcaaagcgaagagataatcaacatggtgattaggcattgtgtctcctcattgattgacacggcggccggttcggattattttagcggaggccgcgcgggcattcgatttcccacgaaaggactttggttttctcgcatgagcgcaaaactccgtctcggcgtcatgatgttcctcccctgcgccgtccggggctcgcgggctccaatgctcccggcttgtcttcggagcgatccccgcttctccggcgccgggccgggcctttctttcgccctgcttccccccggcgatgatcatcccgccgttgatcggcggacggtccgccggcgaagccgccccgaccatcgacgcggccaagacgtttctcgttttgaaggctcgggccgtcctctgcccggagatgatccaggccttcttccgggataaaaaagcggccgggaaaatccccgggccgacggcattataaacgaaaggagatctccccatgtcgcatcattcagctaaacccaacctcggcgtcggcatcatcggcggcgggttcatcgcccgcttccacatcaagagcttcgtcggcgtccgcgacgccgacatcctcggcgttttcgatcccgaccggaaacgggcccgcgaggcctgcgccctggcccgctccctcggcgtcggcgaagccaagccgtacgcctcgatcacggccatggccgctgatccggccatcggcgccctctggatctgcgcccccaacttcacccgcctcgaagtcatggaggaaatcgcccacgccgtcctttcgggcaaagccgagctgcggggcgtggcctgcgaaaaaccgcttggccgcaacgccaaggaagcccgccggatgctcgccctcgtcgaaaaagccgggatcctggacggttatctcgaaaaccaggtcttctcccccgccgtcacccgcggcaaggagatcctgtgggcccggggcgcggccatcgccggcccgccctacctggctcgggcggccgaggagcacagcggcccgcacatgccttggttctgggaaggaacgctccagggcggcggagtgctcaacgacatgatgtgccactcggtcgaggaagcccgcttcatgctgacgccgccgggggcgccgcgcgacgtcctgacgcccgtctcggtcacggcctacacgaattgcctcaagtggcaggagccgaaatacgccgccgtcttgaagaaaaacagcggcggaaagaccgattacctcaaccgcccggccgaggatttcgcccggtccctggtcgagttccggaacaaggacggcaagatcctcgtcgtcgagacgacgacgagctggtgctacgtcggagcgggcctccggctcagcatggagctgctcggccccgagtacgccctccagatcaacacgctcgacggcgccctgaaggtcttcttcagccgggaggtccggggcaaggccggcgaggacctcgtcgaaaagcagaacgcggagatcggcctcatgccggtcgtggccgacgaggcggccgagtacggctacacgcacgagaaccgccacatggtccagtcgttccgccgcggcgtccgcccggaggaaaatttcgccgacggcgcggccgtggccgagctcctgatggccgcctacatgagcgccgaaacgggcaagaccgttcctttcccgcccaagggcctgggcacgttcgtcccggccgtggccaagggaacgtggaatccgataaagaagtgaagtccatcaaacgggaggatccatgaaaaacatcgccgttccgcttgcccttctgctggcggccgccgtcgcgccgggcgcggccgacatccggcacctctcccccgagctccaaaagaaggtcggcgagacggactatgcgtccgtccgcatcaagaacttccccttcgcctcggaggcctggacgttccggaaattcaccttcttcgaaaccgtggccaagctcaaggagctcggcgtccgcggcctcgaggcttttccgggccaggccctggccgcggaattccccggggcgcgcttcggcgaggccatgacgcccgagcagatcgcgaaaacgaaggacgtcctggcggccgccggcgtgaccctctacggctacggcgtagtcgatatcggccggaccgaagcggagatgcgcaaggtcttcgacttcgcccggacgatgggcgtccggatcctcgtctgcgagccggaggacgacgatttcaccctgctggaaaagctggtcgccgaatacgacatcaagatcgccatccacaaccaccccgctccgtccaagtaccacttgcccgagacggttttccggcacgtcgacggcaaggatccccgcatcggctcctgcgccgacaacggccactggatgcgggggatgatcgacccgcgggaggcgttcaagctcctcgagggccggattctcgacgtccacctgaaggaccggaacggcttcgggacggggccgggcgtcgacgacgtcgcctggggcgccggcgcgggaaccatccgcgatctcctggccgagctgaccctccaggattatgacggctggctgacgatggaatacgagaatgaagccgaggtcgacgacccgatgccggccttccggaaaagcatcgactacgtgaagagcatcacgtattacgacggctacacgcagatcttccgccgcggctggggcggcgactacgaaaagcacggctggaatcattacggcccggggcatttcgaggtcgatccgaaagccggcgtcctgaagggccaggggggcatgggccttctctggtacggaaaaaaggtcaaggatttcatcctcgacctggaattcaaatgcgccgcggaaacgacgaactcgggaattttcctccgcgtccccaacgtcccggtcagcgacgactacatttatcattcgatcgaaatccagatcgacgaccattcgaccggcctccatcacaccggggcggcctacgacatccaggcgcctttgaccggcgcgacgctcccgccgggccggtggaaccacatgaaagtggaattccggggctcgcgcctgaacgtctggatcaacgaaaaacaggttttggattgggaggccgcgcccgggggcaaggtccgggacatctccccggaggggtacatcggcctccagaaccacgacagcgactcgccgccgtacttccggaacatctacctcaaagagctgtaaacaaagaggagacaccatcccgattcacccgatttccccttgtgcccggaactcctttcattcacgggagcggagggagaaatgaggtgaagagggatggtgtcttcctctgaggccggtttcttcaggattccgcggccgccggccggcgttcaacgaccatcagccggaaaagaaaagccaagccgacagcgaagaacagggtgatggccaggaccgagttgcgcatattgcccgtcagagcctcgatgattccgaagctgaaggtgccggccaccgtggccagcttctccatcacgtcgaagaagctgaagaacgaggtgtggtcctcggtcggcggcagcatcttggaatacgttgaccgggccagcgattgcgagccgcccatgaccaggccgacggcgatcccgacgcagaggaacccgacggcgtcggtgatgaagtaggcggcgacgcaaatccctatccaaatatagaccgtcaggcggaaagccttgatgttgccgacccggcccgaaagccgggcgaacagccaggcccccagcatgccgatcagctggatgaggaggatcgtcgcgatcaggacggtttcacccaaacggagcgctttttcgccgtaggtcgcggccatgaacatgaccgtcagcagccccatggtgatgaaaaagtaggccgggagaaaaatgcggagccggggcatccgacggatttggcggaatacgatccgcagctgccggtagccgcccaggatgacgctcgttcccgtctcccggtggccgaacgtatacttcggcagccgccggaacgtggtctgggaaaagccgaaccaccacagcccgaccgaaaggaaggccagcttggccgggagcttcggatcggtgattccaaaaaaggccggctgcatcacgacgatcaggttgacgatcaggagaacgacgccgcccagatacccggagatgtatccccgggcgctgaccttgtcctgttcagccggcgaggcgatgatcggcaagaaggagttgtaaaagacgaggctgcccccgtagccgaccgtgcccagggcgaagcagatgaccccgagctcgatcgtattcgagtcgaaaaagaacagagccgagcaagaagccgcgcccagaatcgtgaatcccttcatgaatcccttccgcaggccggtgtaatcggcgatcgaggagagaaagggcgaaaggaaggcgaccaggaggtacgccgcggcgatggcccaggaatagaggacggtgttgatgaccgggaggccgaagaaatggacggtgaaatcgtcgccgtgacgggtcacctggttgtagtagatggggaagatggccgaggagatggtcaactggtagaccgagttggcccagtcgtaccggacccagcctttgatcgtgcgcttatcgtcctggggaatgggttgatgcgggccgaggcgtggagtcaaggatcctcttttcctgacggaattgaaagcgcctatttataatgaaactcggccgaaaatgcaacttcggccgcccggcgggaaaatccgcctcgccggttccctccatcctttcgaggaagacgtctcccggcccaagcccgcgtccttggcattcctccggggaggatgctacaatccaaagccggcggcgacgcgcggccgcgcgccgcgatttgaacgacagggatgttcagtcatgaccgcgaccatccgaaagacttccggatttcccggtttccttttgcttctcgtcctcgtcttcggcggcgcttgggccgcccaggcgcccgcggcccagggcgccggcgagggacaagaccttctcctccggcatcgggaatggctcaagatcaccgacaccttcattctcccggccgaaaaggaagccttcctctccttgacgaacgaacgcgaccgggacatgttcatggaagcattttggaagcagcgggatccccgtccggacacgccccggaacgaattccgggaggagatcgagaagcgcttccggttcgtcatggagaacttcggccggttggctctccgcgaggcctggcagacggaccaggggcggatctacatgattctcggcccgccccagtccaaggacacctacgaggggacgtcggggctgcacccggccacgatctggcattatatcggggacccgctcaaaaagctgccgcaggcattcgacttggtttttttccagcgcggcggcggcggcgaattccgtctgtacgatccgatctccgacggcccggccagtctcctggtcgacacccgccaattcaaccggaacaatcccatcgaggtctttcaaaagatcaaggacatcgccccgccgctcgcccgggccgccctgaccatcgtccccaaccagatgccctccaattaccggcccaccccccagaacacgatgatcatcgccgacattttcgcctcggcgaagcgggggatcagcacggcgtacgtcaaccacttcctcaactaccggggaatcgtcggccccgaatacctggcgaatttcatcgaaagcgacgcctcggccagcctcgtccgcgacggcgggcgggggatgaccttcctccatttcgccattctgccccggcattcgtccttcgattacgacccgtcctccgaccagtacgggtgcgatttcaagctcaccgtcggcttgaaaagcggcgagacgaccgtgttccaatatgtccgggactatcccttccgatttccggccgggcaagtcgagaacgtccgcaagaacggaatcgccgtccaggatatcgtccccgtcgcccaaggcaagttcaagctgaccgtccttctccagaacgccgtcggaaaggagttttcgctcttcgaaaagagccttgacgtcccggtcgaaaccggcccggccgaactgaccgagcccttcatcggctacggtctccaagaagcgcccgagccggattacgccccctacaagctcgccggccgccggatcctgaccgatccgagggcgaccatcaaccgggccgacacgctggtctacggcctttccgtcctccgcctgccgcccgacctgtgggccggcgggacggtcgacgtcgcggccgccgggaccatgagcggaggcaaaccggtcaccctccggacgatcaagctgtccgaaaccgaatacagcccgacgctgacgatcaccggcgaaacgcccgccgtcgacctccggcccgactattatgagctgaccttctccctcaagaacgccgccggccgggttctcgccgcgacggaagccaacttcatcctctcccccgtggccgaagtcccccgggccgtcattctgcacagcacggtgccggagagccgggcgtttctcttcgattacggcctggccgttcaatacgaccaatccggcgacgcggcccgagccgaggaggcctaccggaagatccagcgggaccatccggagttcgaggaagggatgtttcgattcgcgaatttcctcgtccgggccgggaacaacaccgaggcgctcgaaatcgtcgagctcttcgccgcctcgtccaacttccggttcgattatttcctgatcaagggcctcgccctcgaggaaaagggcgcgtgggaagaagccctggcgaatcttctcgaagcccggaagctctatggaggcgacacgcgggtgctcaacgccttgggcgggtgctattaccggaccgggaaaaaagccgaagcccgggaagccctcaacgcctccctccgcctcgcttccggccaagccgaagtccgggccctgctggaacgaatcgaaaaggaacggccggaagacccgccgaccgcattcgattgacattcccgctgggcatgggatatatcttcaagctcgactgaattcaggatctcaaccgcccgacggcggaaggagccgcgagatgatttttcaaatcgtcctcattctgctcgcgatgatcggcgcttacgccgccgcccactggaaaaagctcccggtggaaatctgcatttttctgaccgcggtggccggcggcctcgccggcgccgtggtgaaaactcctcctctcctggaactcccccgtcacctcgtcgagggcgccttcccctatctcgacgtgatgctggtcttctcgacggccacgatcttcatggccgtcgtcgaggaatcgggcggcgtcgcctacgtcgtccgagggaccatccggctcttctacaacgtccgggtcctggccctgctcgtcctgatgatcatcgtcctgatccccggcgctctcacgggcgcggggtcggtgtcgctgctcgtcgtcggcgccccggtggccctggctctcaagcatctcggcatcaccgagcgccgggtcgcggccattctcttcatcgtcgccggcctcgcggccgtcgccccgcccgtcaacatctgggcgatgatgctttgcgccgggacggccatcccgtatgtcggcttcacctatgttctcggcatccccgtcctggttctcggaaccatcaccatgctgaccctggggctgaaacgggtcggcgtgtccgacaagcaagccgccctggccgccctgcctgaagtcccggcgaaaatgacgggatggcgcgtccttctcccgttcctcgtcttcttcgggttcatcgccgtctcccggatctggccgttcgagacgccggtcatcggcctgccgctgcagttcacggcctcggccctcgtcgccctgctggtcagcccgaagaggatcgacttcctggccctctcccgaaagacgatgatccggctgctgcccctgctggcgaccacggtcgtcgtgggcatgctccagcagatcatgaccgcctccggagtgcggggatttctttcgttcgcggtcatcagcacgccgcttatcctactgtacatcctcctggccgtcatcatccccttctccgagggcgtcctgacctacggtggggcggtgatcctgggcattcccctgatctggttcctggactccatcggcctgcacgccacggtcgtcatcgccggtctgagcttcctctgggccctgggcgacgcgctccccccgacggctttgatcggacgcctgagcatgatggtttcgggctacaagggctcgtacggatcgttcctgacgcagacctggatcccctgggtggtgatcaccatcgtcagcgtcctgatggtcgtcttcagcgccaagctcgaattcctagtccgctggagcatgtgaggaggccgccatgaacatcatcatgattttttattacctcatcaccgcttacctcgtcttcatcctgggctggaatttcgtccgggagaaaaaaagcgtttcccatctcatcctcaccctgcttgtcttgaccccgctcgttctccgccttctccgggtgaaataagggtcccgccatgaaaaacgaaaaaatcctcaagatcgccctgggcgccctttttgccgccctcctcatcgccggcggaatccctctctccaagcaccaccggttccgcacgccggtcgtggccggccccggggtcacccgggtcctccgcctgagcgacttcctcccttcgctcaagggaaccgccggcgacacgaacgtctacgtcctcgagggccgggagccggggggagcggcccttttcatggccggaacccatcccaacgagccggccggcatcatcgccgcgatgatcctcatcgaaaacgcgaccgtcgagaaagggacgctgtatgtcatcccgacgctcaatgtcagcgccagccgcgaaacccggcccggcgacgggtatcccctgtatttcgacatccccacgccctggggggagaagcggttccggatgggcaaccgcgacgcctccccgctcgaccagtggcccgacccggacgtgtacatccactaccccgaaaagcagctcttgtcgttcctggacatccggaacaccaaccggacctggcccggacggcccaacggcctcctcatggaacgggtgacgtacgcggccatggaattgatccggaagaacaaggtcggcctggcggtcgacctccacggcgccgaaaccatgttcccggtcaccaactgcatcgtcgccccggaaaaagcggccaggatcgcgacgatggtctcgatgacggtcaaggccgtggaggggttcgacaaccacgtcgagccgtcgccgcagaatttccgcgggctgtcccaccgggagatcggcgattacagcgacgccctgccgttcctgctcgaggccccgattccttttctcgaccagccgaccgggcccaagaccgtcaagctcatgctcgacggcaaggatcccttcctcttgaagctggccgcgagcaaaaagctgttcgtcccttatgatgaaaacggctggccgctggacaagcggatcggtcagcacgcgtccgtcctcctggaactcctccgccagtattccaagaaattccccgagcaagcgatccgggtgagcggcttcccccgctacgccgatatcgttcaaaaaggcgccggagcctggtttcacgacccggccgaagccgtcgccggatccgtccacgaagaataatcaaggaaggagcgtcatgacgtttaaaagactccggccggtcatcggcctgctggccgccgccgctttcgccggcgccggcctcctcgttttctccgaaaagaacgactccggtctcgacacgaccctcggccccgacaacgaggcctgcacggtcatcatggtcgggaaagccgcctcgacggacggttcgaccatgaccacccacacggccgattgcggcacgtgcgactggaccttcggtcattttccggcggccgaccataagcccggctcgacccggaagatctaccacatcagccaatacaagacctggaaggaagcgacgaagtggccgtatgccatgagccagggggagacggatttctccattccccaggttccccacacctacgctttccaccacggcatgttcggctatatgaacgaaaaccaagtcgccatctccgagtcgaccctggggacagtccgcaagctggtcaacaacaccccctcggccaagctcgacctgacgatgctttcgctcttggggatggagcgctcccggacggcccgggaatgcatcgaaatcatgggttccctggccgagaaatacggctacgggttcaacgacgacggcgaaatgttcgccgtctccgatccggatgaagtctggatcttcgaaatcatgccggtcggcccgctgtggtctccggaaacgggcaagcccggggcggtctggtgcgcccagcgcctgcccgacgaccacgtctcagtctgtcccaacgaatcgcgcatcggcgaggtcaacctcgaggacaaggaaaatttcatgggctcggcccacatggtctctttcgccgtggcccagaagctctacgatccggcctcggggaagccgttcaactggaagcgggcctactccccggccgagggcggcgcggtgagcacgaacggacgccggtcccggctctggcggttcctcgacctcgtcgccccgtccctcaagctcgatcccaacacgcccaacatggacctgccgttttcggtcaaacccgatcacaagctctccgtccaggatgtcatgaatctgacccgggacaagagctacggctcgatcttcgacccagtggccggcatccgcggcggcccgttcaagaatcccaattattatgccgccacccggaaaatctcggtggccaacgtcgaatacacgagcctggtccagtgccgaagcggatttccgtcggccatcggagggatcctctgggtggccttcggggcccaggacacgtcctgctacatccccctgtacgccgggatgacggccctccccaagtcgttcattgtcggcgatcatttcgtcttcaaccggagctccgcccgctgggctttcgactacgtcgattttcacacccaggtggtttacaaccgggcgatccaggacgtggaaaaggtccggctcgagcatgagggcgcggccatccaggccgtcccggagatcgaccggaaagccatggagctctacgccaagagcccggcgaaagcggccgcttacctgaccaaaacctgcgtggaccaagccgaccggatcgtcgccgcctggtgggacctcggggacaagctcctggtcaagtacaaccacatcggcctgtacgacacggagaagagggtccgggaccggtccgttcccctctacgacgaggtctggcagaaggccgtgaaaatggtcgacacgtggatggaaaaataagataatgaatcatcacgcaagaaggagaaccgccatgaaaaaaactctcgccgtccttctcgccctggcggggctgggcctgacggcctccgccgagggcggaggcttcaaagccgccttgcccgtgttcaccacgtcggccgggcaaagcaacgacgccaataccgtcaatatcgtcatggaggaagcgggcgtcctgtatgattactgcgacgtcccgaccgtcgagatgctccaggccggcgtcagcctgggcggaaagaaatccgccgccggcttccacgtcgagtcgacgaccgacacggccctctttcccgcggggacgccgttcaagacggtcatcgtcgccatcggcgccagcctcaagggcatgggcgcttccggcctgaccatcgacgccgaggaaagccgggtcaaggcgatcgtcgattactgcaagaaaaacaagatcctcctggtcgccgtccacgtcggcggtgaatccacccgcggcccggccggcagcgacaacgagcggatgatcgacgccgtcgccccggcggccgacgtcatcatcgtcaccaaggattcgaacaaggacggccgcttcgccaagatcgccgagaaaaccaaggctcccttcatccagatcgattacgccctgggtctcgtcgacatcatgaagaacgctttcgcgtcctgacccggagcaaacgaccggaacgcccgggccgcgcggaaacgcggtccgggcgtttttttttgccttgtgcccccccttgtggtatccttcgcccgggaagatgacgtccgggaccccaaagggttaacgttcgcaaggccggggcgtcgttcggccgaaaacggcggggaggggggaatatggcgctcgccaaagtcaaggatttcctcatcaagcattttgaatacatcctggtggccgttttgctcctggggatcagcttcatcctcgttttcgtcccccagaagacgagctttcttaatttctacttcctcccggtccttgcggccggcgtgattctgggaaaacgggagggcgttctcacggcgttcggctcgattctgatcgtcgtcctgacggtgatcgtttttcccgaggatttcctcgcatcgtccggaaacgaggtcctcaccctcgttttaaaccttctgccctggggcggatttctcatcctggccgcgttcaccgtgggatatctcaacgagcaaaaacaaaaacagacggaggatttgaagaccgcctatatcggcgttctcgaaatcctgtcaaagctgctcgaatccgtggatcgctacacggaggggcattcggtccgcgtctcgacgctgtccatgaacatcgccatcgccatgggcctcccgcgcgatgaagtggaggatatccgggcggccgggctgctccatgacatcgggaaattcgagatcaccgccgacctgatccgcaaggcggccgccctgagccgggaggagcgagaggcgctgtccaagcacaccgacatgggcgctcgaatcatctcccgggtcgggtcggtgctccggcgggccgtgccgatcatcatggcccatcaccgtttctttgtcgagcgagtcaagtcggccgggaacgaggaaattcccctcggggcgaatatcgtcgccgtggccgacgcctacgacgccatcatcaccgaccgtccctaccggaagggccgtccgccctggcaggccatcggggaaatccgcaagggcgcggggacgcaattcgatcccgccgtcgtcgaggccttcgaacgagtcagcgcggaaatgatatcccaggagcgctgaccggccgcgaaaacgcttctcctccgaacggcgtcacgtcccggacgcctcccccttttccgaaaatcccggcgttgtccgaaaagaacttcggccggctcagaagcggatcgtgatgacccggttgccccgggatttgaggaaccttaaaaaatcggcggtcgcgatggtcagggtggccgtgttgacgtttgggtggaaattgacggattccgcccggatcaaatcctcgtccaggacgacgatgacttcgtgtttttcgtcatagagaagcccgaacggcgagacctctccggggtggagtccgaggtagcgggtcatccgctcgtcggaggcgaagctcagacggctgtcgcccaggagccgggacaaggctaagaggtcgagcgctttgagatgcccggccacgatgaggtaatggcgcttgcccggcttgttccggacgaacaagttcttgcaatgcgccccggggattcccttccagtgctccaccgcctcggccaccgtgaaagccgccgggtgctcgtggcgggcataggggattcccaaagcctccaaggcctcgtagacgcggcgttcacgttcttccatgattccgtgaacttttccccgcccgtctgcgtatttgtctaagggaggaggtttgacccatgaaatttcttgtctggctgattctgctcgttttatgctggccgctggccttgcttgctctcattctttaccctcttgtctggctgttccttcttcccttcaagctggtcggcatcacggtcaacgcggtgttcgacctcttcaaggccgtcatcacccttcccgcccggattctccgcggctccctctgatccgtccatcctagactttccaaaaagccgacgacctgaacctcttccagaggggtttggggaagaggagaagaaccggtaaaacgaagatgccgaactcaaggaccaacacgcccaagttccggagcgtggccatttccttccaggtcccgcgctgcagataggggaaccagggcaagttgtaaaaagcgccggcgatcgggaagaacaagcggatcccgacgggcttgagcgtgtcgacgacgatgacgtcggccgccaggtgggaaatcccggtcaagacgagaccccagcggctcggaccgtcccgaagcaggaacatgaagcccagggaaacggccaaaacgaacagcaggttgtgggtgtagtactggtggatgaagacggcccggtcctggaaaaccgcgtggagaaggaagtcgacgtcggccgcgttggcgatcagaaggtaaaggaagagcgttccgacggtctgcttccggtcgaacagccgccagccgagaagaccgaggccggaatgggcgaccgggctcaagagttcccctccgtctcgatttcggccgggcggggattcgtcggacagctcatggcgtaaggagctattgtacgggattgccggagcgaaaaaaagagcgccggccgccgctccggatcagcccggcggccgtcctcggccgaggttttccctcaaccgggcgaaaatccgccgggcttcctcctcgtcgcgggccgcaatgacatgcttaaggaattccagcttccgggtgactttttccagctgggccagagaatgtggattgaagaggatttcggcaagcaggccgtcatcctcgcccaggagcttcccggccacgtcccgatgtctcttgaacgtcgtccccggcaccgacgggccgtccaagcaaacggcaaacaccagggaggcgatgaacggcatggtcagggcgtaggccatcattcgatcatgctcatcgaaggagcaggtccggacagtaatgcctttgcttcggaaaaattcctcgaaaaaagcggcggcctcgggatgggactcgcggatgacgaccgcgctttcctcgcctaaagaagccgagtccgcgaatgtcgggccgaacatcggatggcaggatccgaaccggaaccggcatcggcggtaatagtccggaagcgatgtcttgatggaagcgatatctcccaggatgcattccggcggcagcaactcctcgacctcccggaaggcctcgaccgtccctgccaggtcgacggcattgatgagccagccgggtttaagcccggcgatttcgtccggccgattgaggacctcgacgcgggacgctccccgcgtttgatgaggattcttgtcgaagacaaacacacgatgagtccgggccagctcgccggccagccacgatcccatccttccgaagcccaagacgacgatgttcatcggcgcgcctcatcataacaaccgaagatcttgacaaaccgggctaccgttttgagccggtccagggcaccggcgacggccggatcgcccaaggtcccgtgaaaatccaggaaaaacgcgcagccggacggatcggccggccgggggaatgattcgatgcgagtcaggttgaggccggcctcggcgaagacgcgaaggacgctgaaaagcgatccggccttgtcggccgtctcgaaatcgaaagcgagcgagcacttgttcccctccccggtccgcggctcccggctgaggacgaagaagcgggtttcgttcgtgtcccggtcctcgaggccggacttgatgacctccaagcggtacagacgggcgcacatttccccagcgacggcggccgccgccggcggtctttcctcgaacagcatccgggccgccccggccgtgtcataaaaaggccgggcttccaagcggttgcggcgcagaaatccttgacattgggccagggcctggggatgggagtagacggccttgatctccttgggatcggtcccgggaagggccaggagacaatggctgatccggacgcggatctcgccgacgacatggaggggcgtttggagcagcagctcgttgatccgggtcacggtcccgcccagggtgttttccaccgggacgacgccgtagtcgagactcccgtcctcgactcccttgaagacgtcctcaaattcgggatgcggcaaggcgacttgtccggggaaacggaaccggacggcttcctcgctgaacgccccgtgctcgccctgaaagccgatcaatgacagccccttttcctgaagggcgcggctttccgatacgacccgctcgatgatttcccggttgaattcggggcggagaagaggccggccggcgccggcggccttctccaggaccatcgcttcccgccggggatcggctgaggcggacttcaagcgccgggttctcagggcccactccatgcgctcttccatcagcttgaaaagctcaaaatcgatctcatcgattttcctccgaatttcttcgagagtcatgggagacctccttcatggaatgcggggtggaaacaaagctggaaatcggcggcgacgaacgcggccgccgcctcaaggatcaccggcatccgcagggcgaagcaggcgtcgtgacggccgccggcttggacggcggccggccggcccgtgatcatatcgacggtctcctggggccggccgagcgtggccgtcggccgaacggcgactcgaaacaccacatcgttgccgttggtgatccccccgttgaggccgccgtcgtggttggtccgggtccggccggaggcgtcaaggatcacgtcattgtaatctcggccgcgcaaggccgctccccggaatccggcgccgaattcgaggcccttgatcccggggatggagaacagaagatgcccgaggacggactcgaacgaatcgaaaaacggctcgcccaggccgaccggcaaacccattacggcacaggcgacgattccgcccagcgaatcgcccgccgcggcggccgaagcgacggccgcctcgaaatcctccgatccgccgcaggcgagaacttcgccccgaacctcggccgggcggatgatcttcttcgccaccacgccagcggccaccagtccggccgtcaaccgtcccgagaagtgccctccgccgcggcggtcggcaaaaccgccgtacttgcggaggacgctgaaatcagcctggccgggccggggaaaccggttgagatcggggtaatcctcgggccgaccgtccttgttttcaaaccatatcgccaggggggagccggtggtccggccgcccaagatcccgctgagaaagcggggctcatccgtctcgaggcgggccgtcgtccccggccgcccgcctttccggcgggccaggtcggctgaaaaatcccgctcggcgatctccagtccggccgggcagccgtccagaatgatgccgacagccgggccgtgggactccccgaatatttccatccgcaagcaccgtccgaagacattcatgagattttccctcccaggcgggccaggtcccggaaaaatccgggataggatttggacacgcattccggcccgatgatatcgattccctccgcggaggagaggccggccgcggccagggccatggcgatccggtgatcgccccgggaatccgcccggcctccgcggattcggccgcctctgatgcgagcgactccttcgtccaagccgacgtcgattccgattttcgcaaattcccgctgcactgaacggtcgcgggcgctttccttgtgacggagacgctcggtgccctggatgaggctcgttccctcgccgcaagcggccaaggccgcgaggaccgggaagagatcggggcattcgccgacgtcgaattcaaacggccgcgggacggacttttgacaaacgacgcgatccggcgacacctgcacgaaagccccggccgactccagggcggcgaggacggcccggtcgggctggcgcgaacggggatcaagccccgtcacctcaacccggccggcgacggccccggcgacgagaagggccgcggccgccgaccagtccccctcgacctggaaggcgccggcctggtaggcctggcggccggccatccggaaaatcgtaagctccggatcgctttcgagaacgccgccgaaggcccggaccacatccatcgtcatttcgacataggcccggcttttgagaccgcggacggcgatttcggagtccctctcggccaggggaagggccagcagaagcccgctcaagaattgcgagctgaccgatccatcgacctccgtccggccgccgcgaagcgttccggaaaccgtcaccggcgggcgtccgcaggtcgtccgggcgcgggctccgagatccaccagcggtttttccatcatgtcagcgggtcgaagtctaagtgatccctcggcttcaagcgtgaccggaccggaaaacagggccaggacgggcgcgaacatcctcaagcacaagccggattcgccgcaattcacccgggacgccccggagggcctccccccgcggacaccaatccgtttttccccgcgcccggcgccggaataatccaccgtcgcgcccatgtcggcgatgagacggaaggcgtgtccggcgtcgtcgcagagggaagcgttgagaattttcgtttccccccggcagagaaaagccaccgccgcggcccgctgagtcagactcttggaagggggcgcggcggccgtgccctcaagccgggaaaacgcaacgtgtttcattttcgatcctccgggctacgcgttcgagatcagccggccggccgccgttctcgatcacggcatcggccgcggccgcataggccgggacgcgggccttgaacaaggcggcgatctcccccggcgatctcgttttttccaacagcggacggctcccttccgccaaacgggccgccgattcgacgggatcggcatacacccagaacgtcacggcccggtccttgagaaccgcgcggatttccggatcgaggacggatccgccgcccaaggcgatcaccgtctccggatcatcgtccagcccccggatgacggcccgttccattatccggaaggccgcctccccgcggcgggcgaaaatatcggcgacggtctccccggcggccgcctcgaccagcgcgtcgacatccgcgaatcgcctattccccctttgggccaggatccttcccacggcgctttttcccgctcccatgaatccggccagggcaatcgccttcgagcgcctctccggctggaagcgggccgcggcctttctcatttcctcgaccggagccggttcgccggtgaagagggtgaatccggcggccgcttggtgaagcagccactcccggccgggcacgacgacggccccgcgcgctgccgcctcgtcggccagcctcgatccctggtagcgggcgtccagaaccacatggtccggtcggagcaagccgggatcgaaaggacgctcatccgtggaccggcaggaaacaatgatctccgcgtcggcggccgcggccgcggttttttctggtccgagccaggcgcagcccagatcttttgaggcggattcggcacgttccggagtccggttgacaaggacgacccgggctccggctctacgcattccgaaaacagccgcccggccggctccgcccgcgccgagaacgaggaccgatcgccccgaaacgtcgagaccgcgggcggttaaggctcgaaccgcgccgtcgggatcggtgttccagccgatgagccggccgtctctccggatgaccgtgttgacggccccgattttccgggcgtccggatcgatttcatcgaggaaaggaaggatcgtttccttgaacggcgaggtgatgttcaatcccgcaagatccagagccgcggccagcctcctgatttgcgcggcgttctcgacggccagccgggtatactgtccggcgatcccggccgcccggaatcccgcagcgaagagcccgggacccaggctgtgaaggacaggatgtccggccacggcgtaaacggcagtttcagtcatttctccaggcctcccatgtccggcggattcgttcggcttcgatttgcccgggagccgtttcccttcccgcggccggggaggcgtaagtgaacggggcaccgagcaagggcccgacgagccgggtgatccggcccgcggagcccataccgacggcgatgaccggcttgggaaaatcaagcaggcccatcagccgggcgttgtcggccgggccgccggagaagcaggcgatcttgacgatctcggcgccctgatcgaatccccgcctgcggatatcctccaagacggcccgagtgggagtgccggacgggtcatggaaggaaacgatgggccggcagcggcgggcccgggcggagacgataatgtcccggaggctggaaggggacgcgtcgatttcgacgtcgacatacgcggctcccgacgccacgcccgacgtcaatagctcgaggcggcggggctcgggaacgcggcccgggcggaaggcggcgatcagccggggatgaccggcgaagatcatttggactgaatcccgcgtcaggccggaaacggcgtccaatcgaatttcggcgaaatcatggcggagggcggcggcgcgcgcggccccggccgttttttcagcgagactgacgcagatcacgaagaaactccttgaggacgctccgccggaccgggcggatgaccgcggtccccagacgacggaggcagacgaaacggatccatcggccgtcgtttttcttgtccttgtccacggccgccaagatccggcttgaggacgcggcgatccggatcggaagtccgaaacgatcgagcaaggcggttaaccgcgtctcctcccggccgggaaggagaccgccggcggttgaaaaccgcgccgcggcggccatgcccgccgagatggcctccccgtggctgagaccggccgttttttccaaagcatgaccgaaagtatgcccgaaatttaaaagggtccgggctccccgctcgcgttcgtctcggacgacgaccgcgattttgaccgcggccgcccgggcgaccagccgctccaggacggcgaggtcgccggccaaagcccgttcggccgcgttctcgagctcgatgaacaaggcccggtcgcggatcgccgcggccttgaccacttcggccagtccctcgcggacggccgcgggcggaagcgtggacagaaaccgcggatcggccagaacgaaatccggctggcggaacgtgccgatgacgtttttgtaacggtcgaggttcaccccgttttttccgcccagggacgcgtcggcctgggccagcagagtcgtggggacgaaaccgaaccggattccccgcatgtacacagccgcggcgaaaccggccaggtcgcagatgacgcccccgcccactccaacgatcgtcgcgccccggtcgccgccccgccgaagaagcgcccgggaaatccgctcaacgacggccagggtcttcatcttttcgcctcggtccagaacaagtgtgttccagccgcggaacagggatccatgcaaggcctgcactttgcggtcggtgagaatcaacgtcctttttttgagggcgtgatcttccagcctgaaagccccggcgccgatacggatgtccgagcggccgcccccgacgttcaaaaccagccgggtcatgacaaggcctcgacacaggaccggacggcccgcacgcggcggaccagggccgcgaaagcggccggaagcagcgcctgggctttgtcgctcagggcttcctccggatgatggtggacttcgacgatcagcccgtcggacccggccgcgaccgcggccaggctcatgggctcgatcaagctgatccgtccggttccgtgggtcggatcgacgatgatcggcagatgggtcagctcccggacagccggaacggcgcttagatcgagggtgttgcgggaataaacttcgaacgtccggatcccgcgctcgcagaggatcacgcgggaattgcccgcgctcaggatgtattcggcgctgttgagccattcctcgatcgtcgagtgcattcccctctttaacaagaccggccgggagcccttcccgacttctttcagcagggagaagttttgcatgtttcgggcgccgacctggagcacatccacaaactccgagacccaggaaacgtcccggggatcgaggacctcggtgacaatcggaagccccgtctcgcggcgggctttttccaggattttgagggccttaaggcccaagccctggaaagcgtacggcgatgttcgaggcttaaaggccccgccgcggagagcgtcggccccggcggccttcaccgcccgggcgatcgtcagcagttggagctcgctttccacgctgcacggcccggcgatgacggcaaatccggccccgaggcggagggggccggcctcgacgaccgtccgaggcttatcggagcgagcggttaatttcaatccttgcatgggaacacctttttctcgatggacaatccggtccgggaaaagaaaggggttgggggtatggggcttaattcgggcttatcgcccgaaatagaacccgtaatagaaagaccgggcggcggcggcggaagaaaccccggtcgtaagcatggcgccagtatagggattcgccgttttcatgtcaaggaaaatcggccgcatttccccctgccttgattttcatgacatttctcgagttcgtcatgagggagagggccgggacaacggtcttcgtccccgcgatcctgatgtggcggttcgatcgtccggccgggttcttgatcacgatcgacgccggacggcgggatgagaccggagaccgggaggatccgatgatcgtcccgcgggacggaaaaacagggggcgtttatttccggtactgggagatgaattcctcgacttccgggatgccgccctgaaagatgagatagccgttggagggctcccggtcggtgatctccccggcgatgggggtcagcatgatccgcttgacctcggccggatcgtccgtctggccgagggtccaagcgagcttgacgtaagcgacctcgggaagcatgttggccgccggaaccacgcccagctccatcatgtcccggcccgtgtcgtacacgtacatctggacaaagccccatagcgtctggacggtcatgtagacggcgacgttgcggtcttgggccctcttcagggcgggatagagcggcttgttgacgtgccccagccccgttccggcgatgacgatcccccggtagccgttttcgaccagggagtcgatgatgtccggcttcatgttggggtagtaatagacgatcgagaccttttcctcgaaagcggtgttgaggacgacgccgcggtccgtccggcggcgcttgtaatcctgccgcaggggcgtgatcttctcccggctgaccatggcgatggggatgtctccgatcgtccggaacgtcgaccggtagctggagtgcatttttcgaacccgcgttccgcggtggaggaggccgtagatgtccgacgtcgggccgaacatgcagaccaaaacctcggcgatgtcgctctcggccgccgtcttgacgctgtgcatcagattcagggcggcgtcggaagacggccggtcggacgaacgctgggatccgaccatgacgatcggcaccggcgaattctggaccatgaaggagagaatggccgcggtgtgatgcatcgtgtcggtcccgtggccgatgacgatgccctggacgcccttttcgatttcccgggcgatggcctcggccgttccgatgtactgttccggccccatgttttcgctgaagacgccgtagattttctcggtttcgaggttgcagatgtcggccagctcggggacggaaccgtagagctcgcccggcgaaaaagccgggatgaccgccccggtccggtaatcgagacggctggcgatcgttccccccgtccccaggagcttcacccggggcttccggggatcaaagggaaactccttttccgggatcttgtaatgggcttctttgcggccctggatctcgacgtcccggatgcggtcgaccgcgaccccgatgttgtagcccgagcggagcttcaggacgacgtggtcgggatcggccgtctccgagcggggcaggatgatgccgatatacgatccgtcggccgtgacgattttcgcgtcgctccagacgagggctttgaagctttggaggacctcgagggcccggccccggtagcccttatactcggtgttgttgaagtcgttcatgggctgacctttcccagccggtcggccatcaagcgggcggccccggctccatcgatccggccgcgccactcggccatcaagagccccatcgcccgccgcatccggcgcggtccgtcggcgaaacgggggccccggagggtttcggcgatccggagggcgtctttctccaagtcgcccggacggccggcggccggcagcaggtctgaaacgggctttccttgggccagggaggcttccaggagcggcagcacgccctcccggaaaaggcgtttttcagccagggcctcgaaaatctccgcgaacgccggcgcatccggcggcaagggaggcaagcccttgcgcttcaggcgcttgggatactggatgagaatcacggccgcggttttcggatcgaccgcgtgttccttgaccgcggtttcgaacagccgggcggccggcgaaaaggaaagacattcgacaacatcagccggcaccccgagccgccgataccaccgctcccgctcctggacggagggcggaagcgaggcccggatcgccttgagccgccccggaccgatctttttaggcggaaggtcggtgtccgggtacatccggtcgggcccgggaaggatgcgctcgaaaccgttcgtgtcgtcgggaagggcctggcgcgtctcggaaggcacgccgatcgtcgcctcccgggcccgggcggcgatttcctgggccccgaggcgggcgtcggcctcccctccccagaccacgaccacggcgtcctcgtcccgggccccgagcgccttcttcaccgccgtccactccgagctggacagcgattccccggggctgtcggagtggaggatgttgggaagcaccgtcaagcaggcgatgacccggacccggtcggagatttcctggctgaaatatgtatccgtctgcgtcggccagcggagaaggccggcgaagccgttgaggcggactccacaaacgatcatcccggccttgaccgcggcctcgatcggcgtatagcgcgtccgcttgagcggcttggtcacgtcctcgatggaagaggcgaaggaagccgtcgtcacgccccgccggacgagctcctcccgcagccggagaaggttccattggcgcatggcctcatggtaagtcaagcggggaatccggggaatccgggggactcccttgatctcgacccgcgtcccgccggtcacgctgacgttgacgtcctcccggcccgccccgatccccgtccggacgcggccggtggaccggacgatccggcggagaatctgggcgaccgcggccgcttcctggggagtccgcatgtcggggccggtgaccgtttcgatcaggggcatccccaggcggtccgttttgtaaacccggcggtggccgatgtcgctgacctcccggcaggcgtcctcctcgagtcccagctggacgatccggatgtcccgaccgttgaaatcgatccgcccgtccacgccgacgatcgtcgtccgctgaaagcccgtcgggatgctcccgtccaggtattgtttccgggcgatgtggagctcgtcgaccatgacgcagtcgtagagcatggcgatcgccagggcgatgtccaaggcctcctcgttgatcatgaacggcggcgtgtcgtccatctcgtaggtgcagacgctctcccggttgatccggtagatgatttctttcttggtcttgaattccatcaaggccgtgccgtcgtactcgccgagctcggagagggtggggcgcatgtggcggaggatttcggcgtgatagacgtcgctatagcggccggcggggcagcggcagaacagcttccggccggtcagaagctgctggtggatctccagccccgacttgaatccgaccgcggcgtaatcctcgggcgacatgttttcgaacggcttgaagatgaaatcataagccatgacgggcgggtcctccggcccggaggggacattttcctcgttggccccgtccaagtcaagaaaaagcgccggccgcctcccgttccggtccgaaatcctatcggcggggagccgggaggagagggagcggagccgctcacgtccttgacagactccgaccgctcaactatcctcattttagcgggaaagatgggatttcctgacgagacgtgggtttgtcgttgtgatagtcgaaatacgaaattcctatccctataaaaaaaattaaaagacagaagatataaaatgcaaagttaaaaatggaggaaataagcaatgggttttttagattttattaaaagtggtgaagagcctatttcagtttatgaagattctattttgggacgattattatggaatgataatgatgaggcttggattggaaaatataatggatatatctttacattggcttatgataaaaaaaaagaacctgatatagatcttattaattatgcaagaaatatattaaataatactgaatggttaaacaaaacactcgctgaagcaaaaaataattggttaatagagaataataaatatgctgaaattctaaaagatgaaatatttagtctaaaacttgataaattttatttctttaaaagaaaaaatgttaattccatcttagttaatctcgaaggagggagtgccgaaagatcgtggagaattgaatttaaagaaatgaaatgcattggcatggggtatgatacataagaaataaatgggtagtatcagaaaatctgtataaatgtgataaggccatttacgcttgccccctcatgcgatcttcgaagaagatcattaactgcgaatatatcatagcccaatcgcgttatcataaagtccatttttatgcggcttcgtcgatcgccagatagacctgcttgatcagcgcctgatcgttcgggaagatcttctatggccgcatccgtcccgatgtgaaccgctatttaaaatgggctttcatcgaagccgcgaatacggtcgtcatccattacaaacgttggataggacgacatgcctctgttctatattcaagacttcaggagaaaagaggccatgccaaggccgcggtagctgtagccaggcatctatcggaagcgacttcttggatattgaaaaaaggagaaccttatcgagaacggaatgcaataaagcctgtttcgtccacccgggagcaagcgcgaaagttcgcatgaggccttgagcttcgaaaattggatgcgatcctccacgggggagatgctcatgccgctgagacggcgaatacatgcatctgacggaacgggtattgagcgacgcgacgagactcagcttattgaaaaggagaagatatagaaaaatcacttgaaatgtccggcgctttcatacatgcgaactcatgttgacatggccgggcgaaaccgcaacggggattcccgcagtccagatacttctcgacgacctccttgaccaccggccggaaatatccatattcctgctcaaagcggctctcgtgctcggccaggaatccctcgaaatgatgggacaataccctgtggagcaccgactgctctggatgccgaggacgatagactcccgccatggcgggatatgactcaagattcaggtcaagatcagattctcacggggctccctggacgcaacggcccggatctatgcatcacggagagaaacgacaaccaccgttgacgctcgattttccgggtggagacgccgttgatgaagacttctgagacaacggcgatcaacgcttgacgaaatatttctgccgccgtggatcaattttaggcaaagaactacgaaaactcagaactggccttggctgcggccaaccgtttgacaatcgaaaagcagaaactttcagcgtatttttttgatcatcaccgggagggtcaagagtgctcggatgttgaagcctcggatctgcggcggagcatccgccggtaaatccattttccggccatggtgatcaaaatgatgacaagataattggcccaaatgtaggaacgctctttatggaagaagccccaggcgatgtgcgagggataattttcatagatgcggggaaaaacggccgatggcaggataaacatccagaataaagcgtcgaggaagatcgacaacccgatccagtaaagcgtgagctgtttccattccttatcgaaaaacgccccgcccgggtttttcgtcacccggaaatagagataaacaaatgccgtgtagaccaccgggaaaagagtcatcgtcgaaacgatcatcgccgtgggcgaaatcaattcataaatgagcgtcccgccgacattgccgaggacgtagggaatcaagttgcagaccgtcgccgttttccaattcatctcacccatccttcctgccgttgacgggccgaatcgccgatcagaattccatcgcgcggtccggctcggaacatattacatgaggccggatagaagtcaatccgattgaatcccggcggcgcggcgggtatagtgattccgccatggtcgagatcgggaaaaccaacttgctagcgatcgccaaaacggtcgacttcggcgtctacctggacgggggcgagctcggcgagatcctcctcccccgccgctatgttcaggaaggagccgcgccgggcgacaagctcgaggtcttcctctatttcgactcggaggaccggttgatcgccacgacggaaaaaccgcgggccggggccggggaattcgcttttctgaaggtcgtcgcggtcaatccggccggggcgtttctcgactggggcctgcccaaggacctcctggtccctttcggcgaacagcaaacgcccatgcgggccgggaataaatacgtcgtccacatctacgtcgaccgggccagccgccgcgtggccgtcacgggggccagtccgccgttggctgctggagccatgtcgatgatcggctcttcgacctgcccgagccactgcggaggcgtttgctcgtcgaaggaccacagcgagcggcctacggcgaaagccaaccccttcccgaagcggccgctgaccggcgcatgaatccgcgcttcccggaccaggccgggcagggccaccgccatccccccccagtgcagccagcccgtcctcgttgagcaaccagagcgggtagcgccggccggggaagatgaattccaccggcgccccgtatcgggaacggcggccatgcgtccccagcggctggcaaatagcttccgctgccccgatggcgcgtacaccgagccggaggcacaggcgatggcgcgcacggcatcgttgacaaagccgttggcattggtgaaattgcagaattcccggccatcgaagcgcgatacccccagctccgtgccaaaccacatatagcccgcgtcgtcctggacgatggaggaaaccgaatactggatcagcccgtcgcacgtggtgtaatgagagtagaaaggggtttgcgcctgcaacgcggaagccaggaggaggcccggcagcaagggaaataatatgttgaagtgatgttttttcatgatttttgaattctaaagaaaacataaaaatatgcaacagcagacggagctttggggccaggctggagcagggtcccctgggcccgctcgacgacgcggcgcgggatgccggcggcgaacagggcggaagcgcagaaaaccgtggccgccgccggagcaaggaaccgacgcggagacggggagtgcctcatcctatctgcgggagcgagagcctggccagcgacgcgtccgtgcttgaatggagcgtagtccatgcgccgatttttaacgcccgcgaatgcggaaaacgcgctgcgccacagaccgtcacggccggcaaaatacggatgcccgaacgaaccggggattccatccgccaccttgactaggaatcagcgatcaggctgccccattcttggctcccctggttttggacttggcctgcagaattccgagcaagatactcacgccgatcaccatggcaatggccgggattgagttctcgatcccgaacttgccaccggtaagcaactcggggccgtgcagcctgctttgcaaaggagaatagccattgaattcactgagccccgagactgtcaatccgaaaagaacctgggcgaaattccaccctgcatgcatgaacaccggcaaccacaagcgctgggtcaggctgaaagcgagacacatcatgattccgccggaaacagccgaaatgacactgagcagattggcgcccggcgtgggcagatgggccagcccaaaaagcaaggcggagatcagcaaggctggatggaggcccagccattcctccatgattctgaaaatgaccccgcggaaaacaatctcttccacagccgccagggcgaacaggatcgaaaagccagccagaattttcacccagctgaatttccaggccattatgccgtagtatccaagaattgcaaggaggctaacggcgccggccatcatgagcatgcctgcggccaagccgagcagggcttccctggggaaacgggatcgtgcaagttcgctcacttttcttttttcatagattgtgaacagcaggcggtacaaatagaacatcgccaaggcagtgaggatggcccgaatgggacgtccgctggtttcctcaggtttcatgagccgcgtcaggggcttcagcatggcgctgatggagaaatagccgacgactagcaccgtagttgcaaggagcatccgcgacagggggccatggatcaacccgggggaagaccggccgattccacctcgcctcggatccgctgctttgcattcttttttttccacgatttcctcctgaatttttcttgttttcgaatcgcccgaccggcattcggccagccgcaaataagataacttcgcgaaccttgcccggcaatgggaaaccattccttttttcaaaacgggaaagttttcctattcaggatgcggcaaatagtgatatcattcccagcggcttgtaaagagactcggcatcatgtcagcgcacttatatatcttcgtggccttcatcaacctgctgatcggtgtctgggccattgtccatctgcgctacttggggaaaagccatcgtttcccttatctcaagcacctggcacagtacaccttttttctcaacctggctgtctttcagctgcttgtattcatgtacgggcgggccaacttgcctggggccgcaagcgcgcgagactcgcagtttttgggggaaagctggaactttgcatccatcctgttgatctcggccatgctgttttccctggctcaggtctcccgggagcttctaggcctccgcctcctgaaacgagcgtttctctggtatggtgcctggtgcggattggtcctgctgattttcctgggcaagaattttctggccagcggctttttccaaagactggccgctttcacggtcaaccaggttttggacagccttctgctcctggagccagccattctgatctgtctgcttgtcgcaagccggaagaatgccgaaccgacttcgaggaaaatgattgccgggttttgttggctctacctttcgcgttacggaggctggctcttgttgttttgcctgagcggaatcgccaggcctatttggttgttgctggccgcggctgtttttctgtatgccaacatcgtccctttcctatggagcggcatttatttcacggggcaccttggcagtcgccttgaagcaatggatgttcgtgaacaaatggccgcattggaaaagcagtttaatctcacgaagcgggaactggaaatactggccttgatgctggaagggagaaataacaaggagatcaacaccctgcttttcatttcctaccatacggtcaaaaatcatgtcaccagcatctatcgcaagcttggagttcgcaatcgttaccaattgatccaccgggttgccaaacaaaaccgatagccgccgctttgaaccccatgcgtcgatcccgcaacgaaacgcgcatccggctaaagcaaccaagccgaacgccgctcaggcgctccctgaccaggcgcttcagctccttttcttctccgctttgagagggttctcctgggcccgctcgacgacgcggcgggagatgccggcgcgggcgcgcggccggccttggttgacggctagaatttcaggtcgaagccggtgttgaggatgtgcagcggctccttgccgctggaatcctggcgggatgtagctgagggtccactcgacctgccgggagagggggaacgccgtcccggcgtagacgcggtggctgttgaccttgccctagcgcagattggcgaagggctcgacggccaggaaggccttgaaggtccgcgcgcccagggccagcttctggaccagacgcaggcgcaaacgcaagtggtcctcggcgagattgtcctcgaacacgcggatctcgttgcgcgcccgggcgtcgaagctgagcgtcttggagagatcgaccttccagcccgcctccagggtgaagcggttttcctgcaggctggccgggcttttccgcgtcgtttcccgcaggtaggagacgccgacgtagaggcgcgggccgagcaaccaggacgccccgccgcacgccccgcaatcctccttcagctcccaggcacccgccccccatccggcgcgtcgatgaaatccgccagctgttcccgcagccgcttgtgaaagcggtagcctttccttttcaaaatggagaatttcgcgatgtaggagtatccgccccgcaaccggccgtcgtcgccaatgatctgccagtcttcgaccgcgtcccggtgaatgcgcatgcgcgccggatgctttttcgctacttttcggtcatggcccacaagggaaacgtcaaaatggtcccggtcgaatccatggacgtatccccagacgtgcacggcatcgttgacgtccatttccagggcgaagcggcataaggcgtcatccacgtgattccggacctgctccacgaagtacgggagcgtctgccgcgcctgggtgaacgcggcccggaattccggttctgcttcatccacagagtattcgtcgatgcccggcccctcgtcgcggatccatttcacgcccgcaaaaatgaacagcgctgacatcaggccctgccccgcgtagcggatcaagcttcgcagcgtgaggtccgcccaaggaagcttgctttccacaacctgccagacaaccgcaacggccatgagcactcccaccaacagggccgccactcccgacgccgcgctggccgcgcggccgaacctggaccggtcgcgcagccgcaggatgaaaaggggcaatcccagcaaaagcagcagcgccagcaacccgcccagcagctggtcccagatattcatgtcgatgctccttgcccatccagccgatccccttccgagccgtgaggccgcccgccagatggcgccatcatttcccgccgccgggatcatcccttccatcgatcaacctccacccccatcatgcggatggttctttgtaagaatcgccattcgacccaatagtaaacgccaaaaaacaaagcgaccatcaacgagtagacggccttggttgccgtatcctcgggcactatcaagacgctggcaaagacaatcaaggaaaacagcaacgggccatatgtcatcttcacgtccatgcgcgcgccgccatcccgttcattcacgcccatgaccccaaagatgctgcccatgctgcgaagatggggcgggggagtcggatacaccaccaggctgcccttccggggcagccttttcatctgaatcttggcaagagaaggacttcccgtaatggcatatcgccgcaaggtcggcagcatgttcagatacgtctctagatagtctggcttttccttcaccagcaattcacatatccagattattcctgccggcaggatcaacgattctacacccaaaaaattccccccactccaagaatggtcgcttgggccggaaaaggcattatccgggatttcccatatgacccgatccaagccatttgttccatcctctcctgattggattttattccagattgatgtcgtccaggacctgaaccttggtccggcccaagttaaaatgtttgctgacgttttcgcctcttgccagcacggccatccactcacctccccaaaacggctctgccgccgctcatcactgaagtataacgacagaattaccgctcgtcaacggcttgtcctgggtcactacatggtggacgcctcctggtgcttgcgggattttttttcggcagcacagctcatggggcgtcagatagcccagggcctggtggggccggatatagttatactcgtaagcaaagcgctccagttgacgattcagccttccactttggcgttcacggccgctagggggtactccggctcgacacgtcggatcagtctgggtacctccttttgggaaacagtgaggatttttttgtcttcggcttgcgcggcaaggcttgccccggatggttttccctgttcatctccgcttttcggctcgtccgttttttctttgcggattgccttttcttccgcttttttgctcttcccatgcctgaaagtgaatgtcacggtgaagctgttgacgggtttgggcttgccatcgacgatgtacggctcgtaaagccactgtttcagggcagcggtagcggcatccaccagcagcgaatactccggagcggaattttccgtttccggcgtaacaatgtgcttgacttcggtcacccgaccgttaatatcggtggcggcctccaggacgacctgcccttccaatttggcgttcacggccgcttgggggtactccggctcgacacgtcggatcagcttcggtacgtctttattcgcgacccttaccggtttttccttttctggcaaagattgggaatctttctcggagagcttgaagacaacgggaatcagaactttgaccgatatcgccttgccgttgaccatgtagggctcaaagcgccactgtttcaccgcctgcaatgccgcttcgttgaacaggggatggccgctttccaccttggcatcaacaacttctcccttttcgttgacgatgattgccactgtcacccgactgctgacgcggttctttttggcctcttccgggtatgacggaaccacccggtggatcactttcggtggggatgaaatggacaccggctcgcttcgctcctgctgcggcgaattctgagcctccgccttctgatcgtgtgccgatgcgacaaaccgggtcccggaagccgccagggtcaaggccaatgtcaatccccccaggaacaagactccgtgtttcatcttttgcagattcatttttccctccttgtataaaatacgttcgattctttctttaagacccagcggtccgaaaaaggccaatgcccccttcaattccccgtcacgcctgctcttttcggccagggacagcaatgccttggcgtaatccagttcgccggcgatcccgaccgccgtttcgtcgccgatcatctcctgcagcaagagcctccgcttctgcaatattcggacaaggggattccaccagtacagcacgaccgccagttcgcccagcagagtgaacagcccgtccctgttgcggatatgcgcccactcgtgcagtacgacggccctgaattcgcgggcgtccatgtgccggaacagcagcctggggatgaggatccaggcacggatgaaaccggcggccgccggacctttgatacggtcggaaaggcggattcgttccacgggcatgtcgcaggcgatgccggagcccaatgccagtttctccgagatttcggcgctgcccggttggtacgagttgcggatattgcgctgaacgctgatgattccccagacgaggcgcaaacagccggcgagtattccgatgagccagagaaggcccagtacggaacctaagcgcaactggctgcttgcacccggatcggcctggacgaccaggttgtaactgaaagagctcagcacgggggactgggactccgggggcggcagggtgacctgccacaagaccggcccgatccagaccagaagcggggtcagcaccagaacgctcatgatcaggttgatgtaattgcgttgacgctgccagggcgaaaagcgcagcaggcggcagccccagattccgatcaggctgacgggcagggagatcagcactgttttcagtatcagaggcatccaaccgctcattttaccttctcctcttcgtagcggctgatcagcgccttgatttcggcgatctccgtctcgtcaggccgcctctcgctgagaaggcattgcatcaagcgggcggcggaaccttcgaatacccgttctttcaaatcggagataatggaccggtgggccgggtctttgggaacggtcgccgagaagaaataggtacggccttcctcgcggtgtttcagccagccgtattcctcgaggcgggtcatctggacctgtaccgaagatcgtttgatcggttcggaacgcgccgagttgagacgctccagcacctggggcaccgtggcttcccccagctcccagattatgcgcatgatctcgtagttggcatccgacagcttcggtaaatcaccgatattcatgaacccacctccttgtgtgacacgtgtcgcactaataatatgcgacatttgtcacattgtcaactacttttttattttttttaaaaaaggcagcttttgggagggcatgttttgggacagtccctttttcatattgctttgtaatactgtggtaatggtcgcgcacggatgttagtactattgatttaaaaaattaatcttagggagtctgattaacgggcttcccctttgtgatgaagttctacagtatcaatacgaaaacaggctgatcacaggattatcatcttcatcggaatatacccaggcaatgcgatccccggtcacacagagccggctatttccgactgaatcgggccgggttagtccgggcaacggtaaccaaaaacggtcccgatagtcaccatcgaccccgaccacatcgacacaaacccccttagcagggttcagcaagcttgtgaaaacccagaaacagtccctgcatggaactatggcagaaatatccatgaagaattcaggatccgaaaaagccggtttcctcttatcatccggatccttgaaccagggttgccggacataggcccgggtaaaggttccgatcagttgtcgatttttcacatccaccatccggaggcggtagctttcatgatctgtcaccagtagccgttcccgtttttccatatagccaaagaagaagggatccaccatatttatagaaatgccgacaccgccttcatagcgcctgaccttctgagccacccggtgacggaattccagtccgctttcactcacctttccctgttcatcgaaatgtttaagtttgacagtcaagagatgaacaccatcgctggctttggaaaagtccgattcggaactgatgatgagaccaccacgaggatacgctgagaacacccgcaaccaattttgacttttatcaaaacgcatttccctaagcagtcggaaactggaatcaaagaaaatcagtttttccggtgcgtcactgacaatggacagtcctccatcggaccgcaacaataccccgcgggtctcagcccattccccaggcccttcaccggtgatgaacgtcaagtattattcctctccagcgacaattaaaatcccggattggggcgggcgcttttgagctaaaaaagatgttttcccgaaccgatggagggaagcgacttcaccagaggctccaggaggggcgatctcgggaagaccgatgatcatttcgcgtcctcttcggcttttttcttcgcggtcgacatccgatagcttccgacattcagttcgaggatcacgctgtggtgaacgagacgatcgatggccgccgccgtcaccatcggattcttggagatcgtttcccacttggaaaacggaagattcgaggtgatcagaacgctgccccgttcgtatcgttcggccgacaacgtgaagaggacatccatttcgtcctgtccctgatggacatagccgatatcgtcgataatcagagcttcgtatttagctattgacacctgcataaataatgtcctattttaaacgcaaaaaaaggggcgtgtgcttcaggaatgagcggagcagagattgtttcctttgaagggctaggccgtgtcgccgaaccgagttcgtcaagagctcgtgttcgaagatcgcctcgttcgccatcgaattggttttcaggtaacaccagacgttctcggtgggattcaactccggcgcataggccggcagaaactccaagcgccagtcctttttgagagcaatatagcgctgaacacaccgagcccgatgcggcatgaaccgatcccaaagtagcgaaaggggacattcaaaatgccggctcaaatccttcaagaacgaaaggaccttgccggcgttgatgttttcctgaggatgaagccggaaaaacagctggacgcggtcccgggcgggagagacggccagggccgcgatgaccgaaaccttccgataactgtttgttcgatgtcggaacaatggcggctgaccgcgaggcgcccatgtcctccgcaccaaaggcatcatcagaaagccgctctcgtcgatgaaaacgagagaagcccctacgcgagcggagttttttttacccgaggccaatcgatcttgacccaggtctggatggctgcctcatcccgctcaacggcacggcgttgcggcttctgggggctccagcccagagcgtgcaaaattcgtccgatatggtcgacatgataacggacgccgaaggctttttcgatgacctgaacgactcgggggcaggtccacaggtctgtcacaaagcccgatcggccggcccctcgaagcaggatcgcctccagcttccgctttttctgccaatcgagccgcggagggcggccggggagtggcttggaacgaatggcttcaggcccgtccttcaagatactcgccttccagcgtcggacgctacggcggtcgacaccgattttacgagcaatctccacaggctgaagcccttgtctcaaataatccaaggcccggtgtcgtctcgcttccaggaactctgcgcttccggatggtctcatcgcttcccttcggatcagagtataggacatttaatatacaggagtcaatagttcatcttcgccaaattatcctatttcggagggaaagatgggatttcatgacgagacagggaatatcgtcggggattctgataaaaggaaattcctatcattggtagtttgaatatcttactgatgcattctacctgcgcgtagaatctccagcgtgtttccatcatctgcgccatatctttagcggctacatctacgtgctccaccaaggatttcatgtccgtcttctgttcttcgtggtccgcccaccagataacgtccgtcgcgatgccgcaccggccctccggcgttgccgagatgaaggcgatatggttatccacgtgccccggcatatgtatgacccggatttccgtccccaggatcaccaggtcctccggtatcttcttataaagcttgaacgggttgtagactttatctttagggaacagattggagtttttccggtggtcgccgtgggagtgggaacagaccacccaatcgatattgctaatgtgtaaaccctctttttccagggagacggtgaaaacatccggcatcttccccggatcaattagaatcaacacgtttcgcgtttatgcgccgcagggagacggggactgaaaggccgacaaccaaggaggcgggattcgggcggggaacttttgcggtcgctgattcgttctaatcatctaccatggacaaccgtggcggacaacgctcatcgagaaaacgaggggtataacaaggaaattcctatcattaaccaaaattgaacatttctggaggctaataaaatgtctttaattgtaaaagcggaaaaagttaaaaagtctttccggcttgggaaaacagaggtccgtgccttgcgcggcgtggatctggagatcgctgaaaacgagttcacggtaatcgcgggcccttcgggttcgggcaaaacaaccctgctcaacctggtcggcctgatcgacggtctcagctccggaaaccttttttttgacgggaatatggtaggcaggctccctgagagaaaactggttgatatcaggcgccgttcgattggttttgtgttccagaattttaacctagtggcaacgcaaagcgcttatgaaaatgtggaattcccattgctgctgatgcgagtcggggcgaagaagtgccgggaaatggttgaaaggtacctgaaacgcgtggggctgtgggaaaggcgccgtcataagccggcgcagttatcgggcggcgagcagcagcgagtggcgattgcgcgcgccctgatcaaacagcccaaattgatcatcgcagacgagccttcggccaatctcgattcccagaataccagggaggtgatggagttgatggaaactcttaaccgcgagcaaggcatcactttcattgtggcgtcacatgaccccattgtgatcaaggctgcccgacgcgtggtgcagatgcgtgacgggctgatcgatgataatgtggcagaaaacaacaatggagaggaaaatgatcgtaaaaatggcaattaaaaatatttggcgtaacaaacgccgcaccctgatcaccctcgcggtaatcacgatcggggtttcgatgctctgcctggcgatggccttcgtggagtttatcaaggtgggttacggcgagagagtgattcatggtcagacaggacatttccaggtgttgagaagcgacctgctgcaaaaagaggaagacaagattctctctttcggaattgaggagtggaggaaactggcggaaaagatccgtcaggatcggcgggtaagcgcggttacgccgcgcattaattttttcgggctctgctccagcggcgagaaatcaaccgcggtaatggtccaggctgtattgccatccggggagatcgagatgggcgggcggcacattaacagcgactccctgaaaaagctcgcttccgagccggacggtgtgatgctgggaaagctcctggcaaaaagcctgcaggttgaggaaggagaagaggttacgctcctgaccacaaccgccgatggcgccatgaacggttatgatttcaaagtcagcggcacgatcagtacgggatacgaggaagcggacaaacgtttcgccagggtgttgctgcccgcggcccaggcgcttctggcttctcaaaaggtggaaaggctggtagtgacgctgcatgacaccagggccctgaacgaggcgctggtctattggaaggaaaacctgccggaggggtttgccctccagagctggaaagaggtttatcccgattttgccaagaccatgaattttttcaacggcatgatcggttttgtgcttcccgtattgatgctgatcgtctggttttcaaccatgaacacgatcctgatgtcgctgatggagcgatctcccgaattagccacgctgcgcgccatgggcacatccaagttccgcatgttccggatgctgattgcggaaggcgcctggatcgggattttgggcgtcagcatcggaatagtgatcgagatcggcctcgccttccttatcaataacgccaatctcatgatgccgccgccgcccggggccaccgagggttacaggctggggctgctgaacgtgcccgggatcttcacttttgtaggcccggtaactctttgcgttgtgatcctttcgacgcttattccggcccggcgtatcttcaggctgaacattgtccgtgccctgcgtaatggctgaaggggagcactatcatgaacagatttaaaaattatttaaccatgattatgcttctgctgttttatctggtttcggatcttttttgcgctgctgacgcggcagaagtattggccgggattgatcgttaccgtattgtgtccgggtcgtttcgaatgagcctgcgcatccgggattttgacgataccaggctaaaggaggaggcttttttcaaaggctttttctacggtgatgatcgtagcctgctgatctgcgagcgcggaaaaaacaggggcatgaaagtgttgatgaagggtgatgacatgtggatcaacctgagcggttcccggcgcgcgctgcgcatcaccccgatgcagcggctgatgggtgaagcctccaacggggatgtggccaagttgagtttcagccgcgattataacgcgacaatcctggaggctgacggcgacctgctgaagctcgaattgcaggcaaaaaactctaaagccacatatcaacggatcctgctttacgctacgaaaggatcttatcgcccggttagggctgaattctttctgctttccgggaagcactttaaaaccgcttattatcaggaaggcgctctggccgacggccgggaggtgatcttcaagatacggattgaggacaagctcaatgcgcggcgctttactttgatggaatttctcggattcagccccgataaaattcctgaaaaatatttcaatgtcgtctatttgccgcagatcgagacggagtaagatggggcagcgattgatcttcgcggcggcttttttgatgatgaccattttcctggccggcgccgaaagtccgttcaagcttgatttttacggccactacaagtattcctggctcgcaatgcgcgccgacagcctctggaaccccagcggaatccatgacttggcagcgcgggattccgcgctcctgctgcagactgacggccgccttttgctaggcaagcttaggctgcggggtttaccgcttttgcgggtgaaacatgacggcggcttggaaggcaggctgcgtgaagcggtctgcaacctgaacctgggaaactttgacctgaccgcgggcaaagctttgatcaaactgggcaccggttatatcttcagccccatcagcgtgatcactcctcaaaaacagctctcggacccggaagacagtgatcatcagcaggaaggtgtctggctggtcaaggctgattattacagggaaaacttctcgatcagcgccatggttttcaggaaagggaattggagcaacctggcgattttcgcctttggaaacctcggccgcctggatctttatgccatcgtctactatccggaaaaccggaagctggagttcggcctggccgcctcaggcacggccggtgagagcgtggagctccacggtgaattgatgctgcggagccgttcccccgttctcagtcatatggctttttcggttcccgatggagaggagttgtttgttcaatggccgctctttcagccgccggaccgtttttatccggagttgttgctggggaccagcattacggtcgggaaagtaaacctgattgccgagtattatcattccggctgggggatttcccgccgggattaccggcgcttgggaaagcatttcacccattgcctggagctgttgccggactccctggccggaatgaacatggcggcggatctggaatttctgcagagcgttccgcaagcagtgatgtctgactatttttttgcgcgcgcctgcaaaacgctgccaaaggccagcctttcggccctgacctttcttaacctggcggacggcagttttcttgtcgccgcggaagcgtcgttttcgctttttgacaacacggcgctttatcttcgcccgcttctcttttccgggaaaaaaggcacccaatacggcgactctgtttaccgcggcatagtccagaccggtttttcagcgactttctgaaaatgagaactgagagttcaggcatgattttggctctggcgaaaccgcaaaaaaatgtaattatatttgatttagaaaccaagattaaaggaggatataaaagtgaagataaaagttttttttaacacaatcatgcagcgcttcgtttccggcgataagaacctgaagatttcgcttctgattttcgcagctttttacctggttgccataatcacgcgcctgatcatcagccccgcttcgatcccgctctatctgcttatggacgcggggctttcggggcttgttctgtgggtttttgacctcaccaaaaagaggtcccttgctgaggatccgctaaaagatccattctttgaactgacaattctgttcatgatggtttttgcactcagaggcatcgttcccgtgatcccgttgcagtggtgggaggccggggaaatcattcgcaaaaacattgtatatgttctgcccgtggtcctgctcgccctgggatttcgcgctcctgtccaggaggtgataatccttaaaagcaatttcagaaaagacgcgtttcttggggtagtgatctgcgcggcgctctttatccccttgtccctctactccggctcattgaagatgttgacaaacgggcggctttcgttagcgcagctggctgccgtgctgggcgttggtttcgtctacaatattttcatggcggctttacctgaggagctgttctaccgggcgtttgtccagaggcgcttaagcgccgggctgaaatctccctggagcggtttgctgctttcagcgctcttttttggcatcgttcacgcagcgggcaacacgtcctggggctttggaaaaacactgcttgacggttttgccgagtctgtttttgtgcagagtttcataggattgcttctcggggctgtctatctgcgcacaagaaacatattgctttgcattgtgatccacgcctttattaacgccggcaccaatatcgctttattcgctgccagaatcggcttctgatttgggcttccggttgcttttgagcagcttcataaaaggcgaaggaccgggtgaattcaaaaggcccggcaatttgtattgtgatgcagagcaaaacatacatgttgtggatggggccgttgtttcggtttttgatcccaggggaaatgcaaaatccaagcgaaatttccaaagaatctcgctgaactttacatgatggccaatggcgattccattgtccatgcggtcttttactacgaaaagggtacggaatatatcgtggaaaaatatgatggacaaattaagggaaagaggaataggaatttcgtttttcggctaccacaacgacaaacccacgtctcgccaagtaatcctatctttccctccaaagagatattgttaaatattgtgtacggggtagatctaagcatatcccgttggtctccatttaagccgctttttccatgaccccgtcgataaaaacgacgccgcgaatcacatgagcgagcaactgagcgctgttccagcttcctccaatgccgttccgcctgctgggccagcttgaagaccatcatcaatgtcgcctggcgcgatccgcaacctttcgtctggcgcgttcggtgacgaaccgttgccaaggccgattcgaccggattcgttgtccggatatgcatccaatgttcggccggaaaatcatagaaggtgaacagcacgtcctcgtcctttcgcaaacagtccgtcgctttggggtacttggcctcaaattcggacaagaaccggcggtaggcggtcagagctttttccttcgtcggcgacaaatacatctcgtggatcagctttttcgcgtatggttggacgctccggggcaacttgtccaggacgttggccgtcttatgaacccaacaccgttgctcccgggttttcgaccgttcttcctccaaggccgcctagaagcccagcgctccgtcgcccaccgccagctggggagattcggaaagtccccgggccttcagatccctcaagacttccagccacgaggctttgctttcccggtgcccgtcccagacggccaccagttccttcgtcccgtcctccagggctcccataagaatcaacaagcaaagccgctccgtatccaatcggacgttgaaatagattccgtcggcccgccaataaacgtatctccggtcggaaagatcccgttttgcccagctttcgtactcttctctccagccctctttcagccggacgatgttggtggccgaaagtctggccgcttcttgcggccccaaaatcgcctccaaagcctcctggagcatccgctgcgccccctgccggacgatttcgtccaaggccgcccgcgattccgaaatcattcgacctgcgtcccgttttgcggtagtcttttccatgagcgtatccttccggaccccgcaaggtccttgttagattttgagatccaacataggatacgctcattcctttcatacacaactttcggttatatctccgtgatccgggcgatcaaggacaggtatggcgacgactgaattgccgggcggccgaatttacaccaaaaaccgcgccacggcgagggcggccaggacgatccacaccgggcgattccagtcccagattcgtcgaccgttgaagcagacgaacgggaagaacggcagggcaatgtcaaaaaaggccatcgaggatccaagcatggccgttagattgaggagtggtgtaaccgtcggcgggatagccgcccatcgcagcagcgcccacgcgccccaagacaggagcaacagcaccagaccgccggccgtcgccaccggtcctaacttccggatggtgtcccggtaccgccagctcggagtcaccggatagacggatccgagaatcggaaaccagcaagccggacccgctgccagcaccaggcctagcggcaaagccgactcccaggtacgatagcgtatcgtgagcccgtgtccgtgggcaacgaggcgcatcgccagctcgcgaacaccgaagaacacgccgagcaccaaggggatttcccagtaacgcggggagtcaaagaaatctctacccatgagacgccagaacacaacaaacagcagcaggctgtttatcgccaggttgttccaccactgcagcggggcgctgtcggcacggccggacccgggacgcgcccacacgaaatgtccgatgtcgatatagtggaagattttcaaccacacgagggggatgtgcagcccccagcggcgaagctgccggcccggcgacaggatttcaaagccacgcgccgccagcaggttgctggaactcgtgttgttgccctcgacgcagccgaggatttcatcgcaatcccgctcttccagaaagcggatgcctgcgtcgaacaaccgttgtcccactccctgtcccctcgcgtccgggcgggtgaaggcccagtacatcagaccgatccggcgcccgcgcggcagcgaggataccttgagcacgatggcgccctggattttcccctcaatttccgccaccagaacatggggggtgaaggagaaaaaccaccgctgcaccagcggaaacgatcgccgcatgatgtcgcggaccgtcgacttctcctcgtcgcgcatgggacggatgagcatttcagttggcatcctgcaaactcctcgttttctcgatgagcgttgtccgccacggttgtccatggtagatgattagaacgaaccagcgaccacaaaagttccccgcccgaatcccgcctccttggttgtcggcctttcagtccccgtctccctgcggcgcatgagcgaatgataggaatttccttttatcagaagccccgacgatattccctgtctcgtcatgaaatcccatctttccctccaaaatgaacgtagtcgagcggtcgaagtctgtaaggcccgttgaagctcaattgaagacgctgaagatggcccgagtcgccccgggaacaggtcgaaactacgaatgagctgatatttgtccgtaactcccagctattagggaacaccttatgaaaaatagtacgaatatccgacgcgccgcctttcttcgcccttccccggtatgcattggcataaaggccgtaataccggaccatgacctggcctttatccggaacatgggacgtcacccgggcgatgaactccagataatccatcgactcctgatccccgtccttgcagccgatacggtaacccacccggtcctccggcttgataaactcaagctgttccaaggagacgaccggccggatcatgtacttcccgatccgctccgcttcggcctcggtttcggtccgaaccaagctgtgcacattgaatccggaatgccgccatgcgagaaggcgttcggccctctccgagctcagcaatcccttggccgcaagaatcgccaagacctcccgggcaaagagctccgacaaccggacgtcatcgatccgggcgatttcgcggaaaactccccccgcgtccaggccgccgcatgtcaccagaaaatggagatgcccataatttcgacctgcttggcctggcaggatgggcagaattcccgcgttttcgatctcctcgaggagctcgagcccggtgcgatacgcttgcgagtgtgattcgccgggaatattgatgaacatcttcttcacttcggcgatctattgaggcggaatgtcgtcgtatctgtcgactatcgtgtgatccgcaataatctgcgttccatcgcccgtgtcggcatccgtgtccgcggccgtgtcagtatccgtatctgtatcggcatcgccaccggcgctgtcgtcaccgccgcacccgcaaacgctgaaagttccataaacgctcaagacaaattgtgatggtcattttgatgagtcctcccgcccgttcctggatccaggacggctaacgccaaccttccaaggacggcaagcgtttcggccttcgctggaaacagcgatcggtttcgtgcgaaatacgtagccacgggcgggcccccgtctttacctccgcgtccatgcggctttcaccgtcacccggtctcggccgtcagcctctacctgcgcacaccagcgatatagcttgacccatcttttgcccggcatcggctgccacccctggatcggctgcatgaccagctcgatccgagccccggaccggtaaagccgatacgcgccggcgacgatcccggttgtcccatcggccccggacgagaagcgcccgcctatcgtcacaccgtccttcagaccgaccaggtccggaaccggcggggaaaaggccaggctgatctcgtgtccgcagcccaccctcgtcatgctcgcgatctcgcaatggccgtcgttatggaccagtcgataggtggtccctccctctctcgcttcgccggcctgccccggcgaaagagggtccagttggcccgtaaaggcctcgttccaagtgccgacgatcggctcggtgcagtaacgggccaggaagacgaaggtgccgttgatggcgacggggatcgccaccgggtttctcttcacccccccgatctcgacatcgatctgcgtccccgcacgtttcacaaaggcagtccgtttcatgtaaaaaaaggggaacccggccaggtcgtcgatcatcgctccagccggggccaggatgtcgaaagtctttttagccggctggttctcgcggatatggaaggctatgttccgcccggcctcatcctccaatctcaactgcgcatccaggccgagagcggtgacctcgaatctatactctatatcgtcatttaaagaggcctgccccctcgacctgtccaggtacacctctcgattcaggccagaggtgtaataggtatcgatccgcccatccttgtggtagagcagcaccgaagctccccggccttgttcgtcgtcgaatacctgcagctcgatcgtgccgtacacgggatcgtcatcgacgtcgaccagcagcaacctggacatcgcttccaacgacaggttgaacggcgagtagaagacgcctcggcctggcgagccatagatgctcgaggcgttgcggcggtttccaaggtacctggcctgatcgaccgagtaggccttggtctggatggacaggcggccactcttccagagcaaaaagagaacgacggccagggcggcgcaaaccagggcgatgaccacgaactgcatagaaacgttctcctttgaaacagccgccgagtcaaagctttccacttttcgtcgtcgcggccgtcgcgatggcggctgtttcgccgcgcatcgtcgtctcgagttctcatttcgttgatgagactagtaaaaaaactgcgaaagataggaatttcgtatttcggctatcacaacgacaaacccacgtctcgtcaggaaatcccatctttcccgccaaaatgaggatagttgagcggtcggagtctgtcaaggacgtgaactagttcagatctcgtttacggccgagcgcccgccgccggcaagcgagcttccggatcttcctttgatcgccgatcccccggttgactattcttcataatgtattcccaaatagaggggaattttggcaaattttcggctcattccgagccttaagcattcgttgaactaaaacagaccgccttcgattggacttgacagtcctcctgcgctaaattatcttatttcggagggaaagaggggatttcatgacgagacagggaatatcgtcggggcttgtgataaaaggaaattcctatcatttcatcgacgaaacacagcaagaccaggaattccttggcatgctttttgcacctcaaaaaatgaaaggagggcttaataaatgagacctattagatcaatggtgtttcttggattatcagtattgttttacagccattatgcattgccagaggaaaacaacaggctatcctggcgtttctcggcaggcacatcctatttcgcttccaatatcgtgcggccgcttgaagaggcatatatcgaaccggcaattaacaacagccataagtcgttaaacggcccttctccagcaatgcgcctggaggccagctatggcataacccgcaacatgttcgtgaatctgggcgttgaatatatttttccaagaacattcaaacagcgtatcgacttgcccaatgaatttgatgaagacgttttacaaaatgataagctctcaatgattcccgtgtccctggggttgggctattcgatcctttcgactgccagattgaatgtttccgtcatcgccggcgccgacctcaacattatattggactcgttcggtcggagaatattgggtcgcttacaaaccggtacgtctgctttcggaaacctgcatcagacaaacttcggcttccgggcaggcacaagaatcgcatttgacaatttctttctcgatatctctgcgcggttatttgaaatcacccttcaaggtgatgttttcatgcagagaacatttctcttgccggatcaaacaacataccgagtcgttaatgaaaattttaaagctggagatttttggggacttgacaacaatccgatgacagtcatttccatcggcgtcggattcaaaatctaatgattttttccgctctgtcggaatcgtcaattccaaagcctgtcgctcgaaccgtcgcatttcgccggccgggattcggcaaggttaattgatatccatcctcatctctccaaagcggcacgagttcatattaggaagctcgccatcgaacttggcgatgccttcgtccgagagggcgatggggtgcgcggagtcatcgttcgttgacaggccaagaggtcggtttcggtatcttctctgataagcttccggtacgttgtttgaacaaagaggtcctctaacttctcgtcgataaggggccgctcagcgcggagcggacggggaacaggagtcgatggattatctggagttcagcgcccgggacgccatctcccggtgggatagctgccgggcttatcgaagagcgaccagcaacacggctgcggtcttcctggaatacatggaaaagaagtttccttttctcatccgggcgatccaaatcgacggcggatccgagtttatgaaaaatttcgaggaggcgtgccggcagcgccgaatccggctgttcgtgattccgccgaggtcacccaagctgcaggggtgcgtcgagcgatccaaccggacatatcgagaagaattttatgaggtggaagatatcgaaaatcagttggaaggccataatcgtcaactggaggaatggaataagacttataactatatccgcccccatcagtctcttggatatctaaccccctatgagttttatcaaaactggctaatggagcataataaagctaagtgtcactaatctactggacgagttcacgtccttgacaagggggacggagggctggataatggattcccgtggacgactgtagctttacgcgcccttgatatggaacaaatcacccatccgtttgtgcggaaaagtgtgtttatcggcgttctcgaccgcaatctgaaaaaaatcgaatcccgcctgggcgtcgagctgaacatccggggggattccctcaacatcggcggaccgcccgacaaggtcgaattcgcccgtttctatttcgaccggattcgccagctcgaggagaagggacacgacctcaaggaggaagacttccagatcatcctcgatctgctggaacaggggcggaccaagccggtggaggactattacccggccgagcccttgagcttcgcccgcaaatccgtctcccccaagagcctcaaccagcaggaatacattcaatccatccggacccatgacctggtcttcggcgtcggcccggccggaacgggaaaaacctatttagccatggccatggccctgacattcctgcagaacaaggtcgtcagccggatcatcctgacccggccggccgttgaggccggcgagcgcctgggcttcctgcccggcgacatgatccaaaaagtcaatccctatcttcggccgctctacgacgcgctgttcgacctggtttcggtcgaccaggcccagcggctgatcgacaagaacatcatcgagatcgcccccctggcctacatgcgcggccggaccttgaacgcggcgtttgtcatcctcgacgaagcccagaacaccacccggccgcagatgaagatgttcctgacccgggccggattcgattccaaggtcgtcgtgaccgccgacatcacccaaatcgatctcccccaacccagggattcgggcgtccttcacgccctcaaggtcctcgcgcctctcaaggagatcgccgtctgccggttcaacgaaaaggacgtcgtccggcatcccctcgtccagaaaatcatcaaggcctaccaaaaggccgagtcccgttcctccgactgacatgcccctcgtctccatcaaggatctcaagctgttcaaggcgccgggttccccggcctccgggcgcccgcccgagccggagagggcgacgggcatgaagcggatcgtccgggatccattccttctcattttcctgtccgccctggtcctggccacgatcctttcctaccttccgtccaagcagctctccgagctcgaacccggcgacatcgccggcgaggaccttatcgccccggccgacctgacgatcgaggacacggagacgaccgagcagcgccgccgggaggccgtcgaggcggttcttcccgtctacacgctggatcccaacgtgatgctgaacgcgggggaccacatccatcaatttttcgtctacggccgggaatggctcgccgcgccgccgccccgggattatcccgccctacggagcgtcatccttgaaaagttcggccttgagctttccatcggcgacctccaggccctggcccgggaaggattcggcccggacctggaagccagcctcctgaccctcctggaaaatgtgtccgccggcggcctgattctctcgaaaaagctctttgtcaaccgggaggaggagcgcggcttgaccctgaggcttccggacgggtcggaaaagacggtcaaggccgccgagatcctcgaaatcaaggaagccaagaaccggcttctcgaggacgtcaacgccctcgagctttcggcccggaaaaaaggcctcctcctcagcttgtcgttcggcttcctcgccccgaacatggccttcgaccgcatcgaaacggaaatccggaaaaccaacgcttggtccacggtcgaaaccgtgtttttcaccgtcaagaaggggcgggtcatcatccggaagggcgacgaagccggcgaggccgccgtccggctgatcgcggccgtcaaccgggcgatcgccgaccggggagcctggctcggctctttcaccggcgccttttttctcttcgccctcctgttcgtgacgctctggtactatctccggacgctccacgcccttccgaccgcccggaaatacaaccagatgatcatgctgacgatttttttgagcctcctcctgtacaagctggggcttttcctgggcgcgacgacggccgccaatgcaagcttcgcccttctttccagcgccgaggcgtaccggttcatccttccgttccagttcggggcgattctcttcgcctttctcacgaccaatgccgtcgccttaatctatgtcgttctcaacagcctgctcgccggatacctgaccggggccgatttctacctcatgctcttcggcctgatcggcgggctggccgcgatctacgggatcaagttctatggccgggccaagcggaccaacgctctccgggcgggcttcttcatcgtcacgcccgtcaatcttttcgtcgtgatcaccctttttctcatccaaccccgcgtcgtcgcggcccccgtcctggccgccgagacgatgatgtccgtcgtgggcggactgatgagcggcgccctggcttttctcttcctgccgatcttcgagagtcttttccggctcatcacccagtcgaagctcctggaattgaccagctccgaatcggggattctccgccaaatggccctcgaggctccaggctcctatcaccattccctcatcgtctccaccctggccgagaaagccgctgaaaaggttaggctcgacgccctcctggtcaaggccggggccctgtaccacgacatcgggaaaatcaagcggcccgagtatttcatcgaaaaccgggaccgcaaacacgacgcccaccgggatctgtccccgagcatcagcacgctggtcatcgtcaatcacgtgaaagagggactggaaatcgcccggaaggagcgcctgccgcaggcggtccgggacatcatcgaacagcaccacggcaattcgatcgtccgctacttctaccagaaagccaaggaaaaatgcggacccgacatccaggatgtcggcgaggaaacctaccggtacccgggaccgccgccgcaaacccgggaagccgccctggtgatgctcgccgattccgtcgaggccgcctcgcgcagcctccggtcccacaaggacgagcacctggcccgggtcatccgcgacattttcgataattatttccaggacggccagttggacgactgcgccttttccctcagggaaatccgaacgatcgcccagtcgttcctctcgaccctccaaaccatctaccagccgcggatcgaatatccgggattcgacttcgaatccaagaaaaaaccccccaagaacggcgaaccgccggcttccccgaggaccccccatggtggaaatcatcaaccgccagtcgaagagccgaatcaggactgaccggtacgcggccttgctcgagcggctgcttcgccgggcacggctgaaaaacgccgatgtcgtcctcgtcttcgccggcgacgctttcgtccgccgcctgaaccgggtattccgccggaaggaccggacgaccgacgtcctgtccttccccatcgacggccggggcgagggaggacggcgccacctgggcgatatcgtcatctccgttccccaggcccggcggcaagcggccgccctcggtcacagcctggacgccgagctcgccttcctcgcgatccacggctttcttcatctctgcgggtacgagcatgaagccggccacgaggaggaggaagcccgggtgctccggcttctccggcgggaaaaattcgggcctctgcccgcggggcccggggaataggcgatggagatttcgacgatcacctgggccgggctggggctgtgcgtcctggccgcctcggccctgtcgctgttccacatcacgctctccggttattccaaggtcggcctgagcggcttcctggaagagcggaaccacccggaccggacgcggatcctcgaccgctacgacgacatcaagatcgccgtcgaattctggcggatgatcctgatcatcgccctggccgtatacgcctttttgatcttcccggccttccggacccggccgctggggctctttctcttttccgccgtcgtttacgccgttttcttcgacatcgttccccgccttctggccgccgccgggcgggaccgctgcctctcccgcttcctcccgtcctaccgcctctttctttccttgagcgcgcccgtcctggccttcgtccgctggctctcagtccgcgaggagcagaaggaggaagaggccgggcccgaggacagggaggccggggaggaggaaatcgagacgttcctcgacgaggccgaggaagaaggcatcatcgagaagggcgaagacgcgctgctgcggaacgtggtcgagttcggagacacgatcgtccgcgaggtcatgaccccgcgggtggacatggtctgcatccgccgcgacgcgaccatccagaagctccgccatcttttcatcgtcgagaaatattcccgcatccccgtctaccgcgaccggatcgacggcgtggatggattggtcatggccaaggatctcctggcctattcggaaaaggagttcgacgaggcctcgatcgagcccctggtccggccgctcctcttcgtgcccgaatccatgaaagtggccgacctcctcaaggaactccaaaaagccaagcagaagctggccgtggtggtcgacgagcacggcggcgtctccggcctggtgacgatggaggacgtcttcgaggtgatcgtcggcgagatccaggacgaatacgacgccgaggaggcccagatcgtccagaacggcccggccgattacaccgtctccggggcggccaaggtcgaggaaatcgaggatcttttcgacatggagctggccgacgacgacttcatcaccgtcagcgggctggtggcccaggcgctcggccgcctgccgaccaagggggagcgcctgaccatcggccggttgatcgtcgacgtcctggacgtcgaccagaagcggatcaagaagctgaggatgaggaaagccgccgacgaggagcccgaacatgccgggtaagacgtcccgcgccgcagcccggacgggcaaatcccgctccgccccgaagaagccggtttcgaaattccggacgggctacgtcgccctgatcggacggcctaacgccggcaaatccacccttctcaacaagatcctggggcagaagatcgccatcacctcggacaagccgcagacgacccgcctgagcatcctgggcatccacacgacgccgcggggccagatcatcttcatcgacaaccccggcctccacaagccgctccacaagctgaacaagcggatgatgaacttcgtctacgcctccatcgagacggccgacatcgtctgcctcctcgtcgacgccacggcgaaattcggccacggcgacgaattcgccctggagatcatcaagaacgtccggaagccggtgtttctcctgctgaacaagacggacatcgtccgaaaggagatcctcctcccgctcatcgaccggtatcgggccctccgggaattccaggaattcatccccctgtcggccttgaaggggaccaacgtcgacgtcctggaaaatcttctcttcgacaacctcccccgggcggagaagctctacggcgacgacgacgtctccgaccagtccgagcgctttctcctggccgagatcatccgggagaaaatcctggcccgggtggaagccgagcttccctggaccacggcggtctacatcgaccggatcgaccggaagcgggggcaagaggaggaggagccggaagacgaaagcgggccggaagaagccggcggggaggaaacgcccggcgaaagggaagccctcgaggagcccgagcccgagcgggaaaccggccggacgatcgccgtcccgggcgtctcggaccggccgaacatccggcggcgcggggaaaagccaaaaccgacccgggaagaacgccgggcccggcccgccgtctacatcaaggcgagcatcttcgtcgagcgccccaatcaccggaaaatcatcgtcggccgccgggggcagaacatcaaggaaatcgggatcgaagcccggagggagatcgaggagatcctcgaagcccggatcttcctcgacctgcaagtcaaagtccgtccccagtggcgggacgcggccgacgtcctcgacctcatcgaaggccagaaggaagcctagccggagaacggcggagcgccgcggatgccgaccgtcctgatcgtgatcttaagcgcagccggcttggccgccgtctcccaagcgctcaacgtcctgagctatcgcgtcctcaaggcgcgcattctccgccggcggaaatgggatctcaacatttgctgcggccggacggacggcgggggtttcaacgccgacatcgtccgtcacgcggacgtgccgcgtttcgtccagatcggctcgatcgaccgtcttccgttcaaggacggctcctttgagaccgtcctctgctcgcacacgatggagcatgtcgagaatccggacgcctttttcgaggagctccggcgcgtcggaaaccgggtgaccctcgttctcccgcccctctgggacctggccggagccctgaacgtcctggagcaccgctggatcttcctgacgatgcgcaaggagcatcaccggctgccgtcccggatccgcctccccttgtcccggatcgtccagcggcggctggggcagcgcatccacgcctagccgcccatgtctccttccgccacggccatgatctatgggatcgtcggatcgatcctgttcaacctctccaagggaatgcagcgccacggcatcgaagccctctcctgcctttccccaaaacgggccgcccggcgggccggccgccgccggccgggcgcatcgaaaaaggcggccctctacgcgacggggttcctcctcaacaacagcctgggctttttcgccatcctggccaaccgctacggcccgtcgtcctattacacctccatgttcggcgccggactcatcgccttgatgctctacgccgggatcatcctcaaggagcccctccgcccgctccagtacggcggggcgctggttctcaccctgggaaccctcctgctcggttatgacggcatcctccgtccggaaatgaccatggccggcgtccgtcttccggccgcgggaatcatcctcgccgcctcggccctggggggcctgctgatcttattccggacgcggcggaagggcgggttgacgagcctggggatcgtctgcggactgctcatcggcttcgccgccggtctcgaccctatcttgaaagggatcggccagaatctgggaggggtcgacgggcgctatcttccccggctgccgctcggatgggtgatctttctctccagcttcctcttcgccaccctgtcttttgccgcgtcccaatgggcgttccgaagggggatccgcgcttccgtcctcatcccttcccaaaatttttcctatatcgtctacccggtgcttttccaggccgccgccctccccggcttcaggatcacggggctcaccgccttggggctgaccgtcaccgtcagcggcctcctcgtcatgcaagcgtctctccggcggacctagcctccgggaaccgcggacctccgctcagcgcggatggagacaaaccaggcgggcgtaagaatccaagaccactcggttgacggcttcccagtttcttccgcggatcttttccaagcccgtctcccggacccggcgatacagcgattcgtcggtcagcaggcggcggcactcacggtaaaacgacgggccccgccgggcccgggccaccaggccgccgcccgtttcctcgacgatctcccggcatccgccctcgtcagagacgaccgccggcagacccgaggcgatggcttcctggatcacgttgccgaacgtctccgtcgtcgaggggaacagaagaagatcggcgctggcatagacggccgagagcgcgtctccattgagatagcccgggaagacggcttccggcatccgccgtttcagctcctcctccagcggaccacggccgagaaggacgaaggccggcgaaaagttcccgtcttttttaaagaggtcgtaaacctggacgtacacctggagacccttgaaccaggcgaaccggccgctgaaaagaatgacttttttgttttcggccccccagcggcggcgcaaggattcgctccgctgagcggggctgaagaggccctcgggcaatccccgctgccacagggccgtcgcccggatgccgtgccgggccagcttcgccccgctgtcccggctggggacgaagagcgtgtcggcgaggttgtaatacacgcgcagaatcggccaccagatccagaccaggaaccagaggttgcgctcctccaggtaggagacgaaatcggtgtgatacgacatgacgagggggatccttcggagcttggcataaacggccaggacgaggccgatggcgtcgggtacggtcaaatggatcacgtcgggccggaatctcccgatttgaaaaaacaggtgcggccagggaagggaaaacttataatccggataaaacgggagggcgatggccggaacccggaagacgcggatgcccggaagctgggtcgggcggcgggaaaacgtccagacggcgatctcggccttacgcccctgaagggaccggatcagctcgaacagggttttcgtcgccccgtcgaaatcccggacgaacatgccggcgtagagggcgacgcgcaaacctccggggaaagaagagcccccctcgcgttccggacggcggtttttcgcccggtgaagctttttttctttacataacatctattctttgctactggccatagaataccataaaccgggggaagcgaaaaaacactttgaaaaagtcatccgccgatagcctaaacgtccggccgagccggaatgatgcagccgtcgtcgccgggaagttgacttctccggcgccaaatgcgaaaattcggactcctcacgttcggacggtgggtgtagctcaaccggttagagcatcggactgtggatccgaaggttgggggttcgagtctcctcacccaccccaccttttcttcccctgaaaagcctgataaatcaggcatttgcgatgattccagaacgaattctcagccgaatacatatcccatccttccccctgtattccgttcttttccggctcaaacacgacgcaaaacacgacactcgattattacgcattatccgctgaagaattcaaagtctgattttctcccgattacagtaccggttcgatagctcccgccctcatgagcggaataatggcaggaatagcaaaggataacgcaattactcgcggaattagatcctccgcatcgaatcggccgaatatggtgagcatgggcgctttcgccgtacctatgagttttacggccgctcaatccgatacaggaaatctctgtaccgcaacaggcgcatttatttttttgtcttttaagcgcaagctcttggatctttttagagaaatcgccgcttctcgacatttccatattctcctaaagcttcaaattagatttatcctttcactttatttccctcttgacaagcgcgaaattcggcgatatcataatgaagtaatgttacttcattgtctattaggattaagtaatgaaacgtattaaattcgatcttttcttaagccagaaagacattgttcaacttctcggtataagcccggatcagctccaatattggattcgaaccgcgcttgtcaaaccggctatcctccaaaaaggacgcggcaagagccatctgtttgatttaaggaatgtcttctatatcgctcttgcttctcaattcgataaacttggtctcgattatgaaacgattcgcggaatcgtaaggggaaaatccaaagagctatcattcttcgcggaagaatttgccgcgttgaatccaagctatccgaagccgttcatggttatcatccggaaagcaggtaaaccggatatcacgttccacgccagcggagaagagatatttgaggaattcgataaaagaaaaccccttggaactgatgatctggcggcttcgcttatgattatccttttcctcccctctctttattctcaattgagtcttaaattaggcaaaatgtttagtgaccagtcgaaccgtgaatatcgtcgctttctagaaaatacgggaagcaaagttctcctcccgttcgaaaatttcttactcggttcgatgattgacgctcgttattcgggcaatcaagaaaaaatcgatcaaatcaaaaagacgcttctcagcggaaaacttccggctaactattcagcaaaggaaatcacgccggaaaatgccttaaagctttttagggagctatcttttcgagaaaaagataaacaataaattaatggccccaacccggtgcaacgggttttaatggggccaaggagcagatcgcgtgaccaaactccctcaattatctaacacaaccacaaaacacggtcaacaaagcgaatcttcgggctcagggatcccatcgaccgaaagaagaagatgggtaaagattcctgaatgcgctgcctaccttggtatcgcggtcaagtccgcctacgatatggccgcagccggaaaactcccggtcgcccgagtcggccgacttgtccgcgtggaccttcgagccctcgaatcgaacctcgaagctcagatcaaggccgcggcccggtcgatatagcacgaccatagcacaagcatcacgctgctatcgatcatgaccgcggctaaggaaggttactggttttgccgagttgcactcgacttgatcgaccattcttcctttcccaaaatgcccggaaattatgcaaaggtctatctttatgtctgtagtcgtatgaattttaaaaccttcatatccaaggtctctgtcaggaagatttcagagaaaacgggctgctcccaaactacgataattcaagcgcttcgcttcttcgaggagcttggcgcaattaccattacacggcacggccgccgggcaagcgatatcgaaatcatcaagcgctttggcacgccttcccctgttgagtgctccagcgccacggaacacagggtaaaaaaacaaattcgctccatttcaggccgatttgctccagcgccacggaacatcttcagatcttctcttctcagagatcttctttacagatctccccccctccgcccccccacaggggggggacgtccggacatcagaaaccttcgtccggacacgttcttcctctctctcccgaaacaatcaaggatttcatcaaggaatggggagatgatcgaacccggcaatatctcctcgatcacggctatcccttgccggaggaaatttttgcagcccataaaaaggccgactcccccttggacggctcaaataacgacatcccgcccgttccccagagagaaacgatggactctatatccgaatcgaaggacatatcatgaaaaccgtcaaccacaagcaggtcgccaaggttcccgcccatttgcagagaatgcagggaagcccggtagctgcgaagaaaaagcgagtagtcggccgcccgtttcaatccgggccggatccccgccgacacaagggcgggcggaaatgcgcaaccgctctcgaattctcccaggctttcgctcgagctcttgccgaagggggaagcccggaagacctggccgccctcatttgggaagagaccatgaagggaagcgcctatgcgaaagacgtaatcctcgaccggttaatcgggccggtgacgaaagccgcccttatttcgagcacgccgacgatttataggatcgaatacaagccggatgatggatccgacgaaatattacatcttccccccttgaatgtcccggccgaaaaccggccgtaggataaatttatcggcaaggagaaaaaaatgccgacactcaaagatcaattcattggagagctgcaagcaatgtacggaaagccggtgatggacagctccggaaaagtcatcggccgaatcggagaagatccggaagagccgacaacctccgcggaggagaggatcaatcagggcttcatccaagccgcggaagccaagatgaaggacatttcggccgtcctcgagaagatgtccgatgccgtctggaattggaagaaagccaaggacaatatcaattggctctcttttgcttcccggcaaaaagcgcattcgatcatggagcccctcgagaagcagattttcgagagtcgttcccagatcttcaccgaaatgcgccgccatctgggatatccggattgcgagtccttcaagaagctggtcaacgcgcatatcggcgaactcaattcgatcatgggcgttcaattccagcccgcggccgatgccggagaacggatcacccaggggctcgagggcgaaggcggaggagaataattctatgttctccgcggctctcaggatcgaaaacggggaaatcatcttccagacgttcgccggtcatgagtatgtcatcgataccggccggacaaatatcataatggcactcggggagaagggaaccttggatttcctcaaaacgctcatggaccggagcatgacggactcgctcatcctggccaacctgaatccgctccgccgcgatacggccgcgaaaatcgccgcggccagggccaaggaagaagccgaagccccggccaaagttcaggaatatgcagcaaagcgggccgcgggcgaaccgggcggattcgcaaaccgggcggaccgagcgcaaaacgatgaaacgctccgccgactcgaggagaaattgccttgaagaaaagcgaaccgaggaataccgcggccaaactcccgccgggccgcccggccggagccggggaagcgggtttctggatccatccttcgttcatcgccggagccgcccgcgggctcttgaaggaaatcgaagccgggaatgagctcgccttgcagctcgccgggatcccgctcctcgagctcgcccggcttgtgcatgccgggcagcaattcgagctccggatccggaacctcgaggacaggatcaaagcgctcgagaaagcagccgcgaaaaaatgactccgagctggatcccccgatggctggggaaacgcgtcttgacgcgattcctaaagcgaacacggccgcgcggcatggaggcacgggcggaaaaggaaaatcgattctacgcgaacggagggcggaaattagggatattcggtcattccaggatccgccctccggatagtaagtccagcaatcatcccaagagaaagagtaattatttcgggatttgtgtcgttattattcctagtaaattaacgttaggcgatttattgaaacttaccgcggatcagctacaggtcatttacgaaaatattttctattaatataatactattttttaagatatctttcaagaattttatttaatctttcaatttcattcttatcagtgatttcaatataatcttttacagataaatttgcattttctattgtctgagtaaattcaacttgaataaagcttccgtgttgatatgattcaatcattatccagcgtgcaagatcgttttcgatttcttttaggtaatatacaaactcagtgctcggatctctgtaaaatatttctttttttaaaacgttatcaaatccatattgaatatcattcacttttttttcaataacattttccccattaatgctttttaatgatatcgtttttaacttattatcttccaatttagtatcgagtcctgataatttcacatatcgtccttctacgattttacatgcaaaacgaaagtatcgtatcggtactatttctttatcgacaggattgggtatccataacttagaattctgcggcatctttatctgaatatattctatttctctaccaattttattttgattccgcaagtaccaacgtcttagtaacttatctattgatattttttcagacggtgtttcaatttcagctttttttactagaaataggagtttaccaccaggagatttcggaaattctatttcttcatcattatcgcttcttataaacgatatttccgaataattaatcacaggagtaaatattccggataatattgccggagataatttttgattttcatttaaaattagcagttcgattccataacgattagatacttcaacgcatccttcttggaatccaactggcgagaccattattgctttatttgaatttatatctcttgacttagttacaaaagcctctacttcgctaactggaactttcgctgcggtatctttgcattcgatcactgttagataatcatagccagaatatttgaaacgaatagtaacatcaaattgtcgattatttattttatcattccatttaacgattccgccttggccttccgaaatatgaatagctgctaccagtctttcgaatcctttccaattatcccaatttttcattcccaaggctcatcaatccgtaaatattttcgcgtctcgtcattcaaactttcaattattaaattatgatggattcttctatgattgtaagcattaaaaactccaacaatattaaaatttgggtattccttttcatgcgatatttttttaaagtaatcttttataaatatttcaagctcaatctttaaatgtatacaaaggttatcttcaatgtcttttagtaattgtcctaagtgtgtttgcaacattgatggcataaaaggattaattaataaattctgcagcttttcaaaacattcaaaataaagctttgttacatatattcgctcaacatgaacaatcccggttttcgcatcctcatacttttttttcccgaggtctattgcttcatcggatttttgtttgtcagaattaaaagtacttattatcttaaaatcatttatttgagatgaatcgccacaataaataaaaccggaaatatttttgtctatatcgctataaaattcttctcggttattaaaaatgaaacctaattctcgtaaatgctgaagtacattaatacgaacgatttttagataatctaaactcgtatcgattttaataggagactgacagagatgcagaacatcgcacaagatttctgattgcttctttattacctcgtttctaataggctgcaagattgtagtacgagctctgcgatatgcgagaatcgtaacaacagctcctatcccagcaaacaaaaacattccaaagtctttgatccatgcaatattcgctttaatgaattcaattattaaaattggtttaactagtaggacgacaataacgatacaaattcccaagaaaatccatttcttatttttccatatcctctggaacattcttcccccctccgactatatgagcttctaaatatttatctatatcttctttcctgaataggactcgctttcccagcttgatataaggaaatttatgattcttcataagattttgaagagtcatatgagaaatccgcaggtaatcttctacgtcggccttagtcattaacttttctttttggctttccattactgccaaataataccaactatcacctaaagaagcaaaatattacttgacaaataggcgttattagacgcttttagttgatagtaggtatatatatttattataaggagcaaaaatgaaataatacctgaaagcggaggatgttatgcgggtccaccaggtctcctggagcacgacttacgatatcatccattccgggtttctcaagtctcacaaggttggccgcttgattaggatcaccgcggaggatcttcaacagttcatcgaacatcgtccaatgaagccaaagaaagccgcccagatctgagtcaacctggaggagagagcaccatgcatacaatcatcttcccgcccgaaacggaaaccgagctcgagaaacgggaaaagcccgtcgccaagccccggatcatcttcgttgttccgcagttcgaggccttggagcaattcaaaccttttcccgtctgtctcaattgatatcgccgccgccggcgggaaccatgatatcgatcgatcactcgctcccgcaaaggatatgtctttataaatacgagtacgccccgcgggatttaatctccctcgaaaagctccgggcccaaatcaatctttattccgaatatgccgcctctgtgaaccgattcattgatttcggctttatcctcgaagaagctccgaaattcgggatagtctggatcaacttctataatccggattactcctggatccgaaggttgggggttcgagtctcctcacccaccccatttttttcaaagacctgttttgaagagaatgccaaacggtttgttccgctcatttccggaattcacccccttcgatccgcagatcgacgacgagatttccgcgattccacgtttaccctccggccgctataacatattgattcataatgtttttcatcaatcagccttcggttcccgcatgaatacaatggttaaaaaagtgaatgaccatccgccttcgcgttttcatgcgccggactaagctgccgatattcctcatgagaccgaatccgggggctttcttgaaggatagattcgcccttcttattttcaaaaattgaaaatggcggcattgataagataatgatctaaaaccacaaggaggtttctcatgcctgatcatccgctgtcccccatgaagaaacttgatcctgaattcatgaaacatctggaggagaccgaggccctcgtctatgccgacggcgccctgctgcgcaagatcaagctcctgatggcgatggccttcgacgcggccgcgggagcggccggcggcgtccgagccctggccgagcaggcgatgagggccggggcgacgaaggaagaaatcgccgaaaccctgcgcgtcgccttcctcctgtcgggagtcggcagtctctacgcggcctctttcgggctcaaagacatcctggattgattggagaaggcggcgggacgagcgcctctccccggttcccggctttcccgggatttcttgaccgacaaacgggccgggatgtcagctccagcgcccgggaatcgccgttccgcagacggagcatgacccgccggacagcttgttttcctcgatcgtgaaacccagccgcttgatgaggagggttttgcaggacgggcagcaggtgtcctcgcccccgatgccggggacgttcccgatgtagacgtatttcaacccggcccggacggcgatctccttggccttcgtcagggtcgccaccggcgtgggcggcagccgggtcagcttgtagagcggctggaaccggctgaagtggaggggaacatcggcgaagccctcctttgccagccagccgcacatgtcggcgatcatcccgaaatcgtccgtccagccggggacgacgagattggtgatttccagccagacgccctgttccttcatcgtcttgagcgtcgccagcaccggctcgaccttcccgccggtgagcctcaggtggatgttgggatcgaaggacttgaggtcgatgttggccgcgtcgatgacttggcacagctcgagcagcggcccggtattgatggacccgttggagaccatgatgttcttgaggccccggctcctggcccgagccgccgtgtcccgcatgtactcgaaaaacgtgatcggctcggagtacgtgtaggcgatcgaccggcaccccatccgctcggcggcgtcgaccacggcctcggggggcgcgtcctggttgcgggtttcggtcgggctgacctggctgatttcccagttctggcaattcaagcaggcgaaattgcagccggccgtggcgatgctgaacgtccgcgattccggcaggaaatgaagcaagggctttttttcgacggggtcgacgttcaccgagcagggattcccgtaggccatcgtgtacagctttccgccccgggcgatgcggttccggcaatcgctgagctcgccgtccttcagggtgcactcgttcggacagatgaggcatttgacgccccgcggcgtcgggctgtaatggccggcctcccgctccttgacgaagctcttggcggccgctcccccggccggggcgccgtccgcggccggcgtccatccgcagacgcaggccccgccggcgtaaagaatgcatttcaagaaatcgcgttttttcattttttctccatccttcgcctcccgcccaaggcgacgaccgcccaggccaagagaccggccagggccagggcaaacagggcgttgcggacgccggccagcggaatgacgaccatcgggaaagcgatcgctccaagggcggagccgagcaagtcatatccgtacaggcggtcgtgccgggcggagttcttttcgagggcggtcgaaaggccggcgaaaaaccgtccgacggccgccgccaggacgaagcccgccgaaagcaagagcacgattttcagaaatcccggtccccggccatgggccagctggggcgcaagcagcccggccgaggccgagacggcggcgaagacggccagaggtcccccggtcttcgccctcccggctttctccgccggccgcggaccggacaggcttcccgcggccagcccgaccatgaagatccccaggaaaagcccggtccagagatagagcgcgccgacggcgatctggatgagcagcagcaggaggatgctggagcccgacgaggccgcgcccatgatgaacatcccggccagggaagagcgcccggccaggatcccccacaggacaagaagggccaagaggacggcggccgggcccaaaatcttttccgggaagcggccgagccaccaccggatgtggctgagataggccgccggtttcaagtcggcgttcggcgccgcctctctgatcaccgcgttgacctgttcgatccgggtcttgaacagctcttcatcgaaatagcccgggcggacgtaaagattggcgatcccgcgccgggcgagcccggacaggatgtccgtcgtcagcggccggccggacatcaccagaacgctcatctcccccggaaagaccgccgtttccgcgaagcatttccgggccgcggcggccacggagccgagcgaggcggccgcgctttccgaaacgtaattggccgtgccgggaagcacggccgcggcgatcccgccgggcgccaggacgctcttcacccgcgcgaaaaattcggccgtgtaataacggttgagctggagattccacggaccgggcagggcgatcaacacggcgtcgtagcggacgccggccgtctcgatccatcggaacggcgttccgcggatcgggaggaccccggaggccgaaggagccaagccgagctttccggctaggcggaacaagtgcggatccggctcggcgatgtccacttggccgacaccgtacttggccagctcggccggcagtccggagagcagcccgccgatcaacaggacgcggtccgggtgctccgtctggatcagagcgaaggccgccagctcttcgttaagcatcgcgttgcccgaggcgtggacaagaaccccgttttcatagacgttgacttggtcgcccgatcgggtgacggtcagccggcccgccccgcccgagaccgtgccgacgagccgctcgttcggatggaagcgctggatcatccacgcgtctccgccggcggtgataaacaaaacggccgcggccagcaggacggccgggaatacccaccaggctcggttttcagaccttccggcggccgccagaagaaaaaacaagcccgaggaaaccgcaaacacgatcgccaacgagggcaggccgggaaggacggccgcggcgcaaaacactccgccggccgctccgccgacgctctcccagccgtaaaccgtccggaggcttcggccttcgcgccgcaggacccgggccgtccacgtgaaggagaatccgttgagaaagcagtacggaagcaggagaagggccagaaatccgctcatggccggcggtccggcctcgatcccgggggcgaagaggaggcttttcagcgggaacatcaaggggaagacagccaaggggacgaccagaagcgccttgaccagcgtcgaagcccttttcaccgcttctcttgacgaggccgcgtccggaacctgggcccgggcgccggtcaacgatccggctcccgatagaagaagccaaaggaagatgatgagcgagagcgtcaactcgttgccttcaaacaacgtcaggaattcccggattaaaagcgtttggaccgccacgccggagaagccgacagcgaagggaagcgccaggtcccgccgggcgcgggccgcggttggagacggtcccgcggagatggacgcggcgatcgggaccggacgcgttttccgccgcttgaagaaatagggggcgtgccaacaaaggtgaaacaggccgataaggctcatccccagcccgaagttgacgtggattttcagcgctttttcggcccaggggatttccagccggtagttgacctgaacagccatcaagacgccgaggccggcggtgacgaggaagaccgccagcagggcgtagttccagattttcctgtgggccggcgtcgagagaatgccgagccggctgaacagaaaactgatcccgtagagaagggctaaaaagagccccaggggaatcagtccgtaaggggcgttcatcgtccctcagcgcccggattcttcaaatatcagcgcctcgtaaacataaatgtccgcctgcttccagccgttccagccgatcccagccttgtcctgggcgcagtgccccaggaattcccgcaaggtccagccggtttcggccgccacctggggaaggaaggtcccgtgttgatttcctttttcgatataaaggccgtgcttgccgagttcgatctccttgatattcttgatcttccgcctgggagtgagaacggagatctcgatccggattttatcgagctcctcgggacggacgggcgggaagcggatgtcccggacggccgaggcggcggcgatctcctggacgacttggaataaaggcttccgcggctcgaacgtccccaagcatccccgcaggtcgccgttctttctcagggtgacaaaggcgcccgccggttcccgcaggatcggagcgtattgcccgggagccaggccggggagcggctcggccttggccgcggcttcgaccgacgcccgggcgatccgtaaaagaacctcccggtcctcggccgaaagctcgaacttcttttcctctcgttcggagacggcgatcgcctcatagccgaccacccgggacttgtccccgtagggttcgacgtcgccggaattcttggagtcgacccgggtgaattccaggtccgcaaccccttccgtgagatagagaagcgtcagggccgccggccaggcgcacatgctcgtgaccaggccggggagcccgagacgggcgttggaccgaaggacatcgagaaaccggtccggatcattggcgcagaatccctcggccgtcgccgcgtcggctttccgggcgtcatcggcggaagggtagtgggaaaaatcggcgctgacgacgaacaggttgtccttcgtgaaatacggtttgagggcctcggcgatttttcggcagacggagggcgtctgggtcgccaggacgatgggcacgattttgaacggcttgttcaagcggacctggaggaacggcaactggacctcgacgctgtgttcctcccggtgcgcttcgggatcgcccgtaaaacagggccgcgtcccggacaggacggccgtcacctcccgatccacctcgacccgccccaaaggcgtgagataatctccctcggtgaagaccgaggccttgcccaggtcgagccggtgggacgaggccaggatgaagacccgggcatagggataatcggcttggacttggttgtagcccgaggcggccacgctccccgaaaaaacgtatccagcgtgaggaacgaccagggcccggacggtccccggaagcgggcctttttggccgttttccagaaaagtcgagaccatgttccggagaacggcggggtcggccgggtaaaacgacccggcgaccgccggtttccggtccgtatcgtccaacggcgcgttcatccggccgaatgcgggaaaaacgaggacgaagacaaaaccaagcagggccgggacgatctcgagacgcatcttcataaatcgagattaagcccggcccggccgcctgtcaaggcattcgcccgcggcccgcgttctttttctcccgccttattcatgaaaatccggtcttcccctccgcgcctggcggcgaaagccgcattcccgccggcggaacggattcacaagcgcccggcccggccgacggcccggacgccgcggggcgtcaacctcgttttcgattcctctccccggccgagagaaccgcggccctctcgattcgtggataatgcaggttatttatccgagcgtcttttcttgtgcccgaagatccctccgccgaggaagagcccggctccgatgacgaagccgaagttgtaccatccgccgttgttgtggacctcgtaaaggcggacggtcttgctgaagatcgaaatgatgaaggtgaccggcgagatgaggccgtgccacaggccgagccagaagccggcgactttcccctcggtgtcgggcgttttctcggcggtgttcggtccgggcgcgcagctccaggcgcaaaacacggccagggttgcgaggacgacggcggcggtcgcttttttcatgggccctcctctttttcttttttcatcataaacggacggcggaccggcgtcaatatccgacgggaagaggcgcgcgttgaccggccgcggcccctcccttatactggcttcgaggaaggaacccaagccgcggaggggaagaaaaccggcgttccgttcgtctcaaggacgccgcgggacgcgcggatcatgtcggaccgatgaaaacgccaagccgggaagcgacggccggagaacggagggaacgcctcttctggggagccttccatatcctcatcctggctttcgccgtctggctggtttccccgttcatcgtcatctcctcctccgccttttcctcccgccaaggatacggcgttcgcctcgccctcgggcttttgatcttcctcatgtatgtggggaaatggtcgttcgacgtcctcgccccccaaggcttggcccgccgggtttcccggcttaaaaccgccgccttaatcgtttacatcgtcatcgtcatcagcttcatgatctacatcgtcgcccaggcggcttcgctctatctgcggacggccgtcgacgagtcggcggacaatccggaccaggtcatcacccgcctggaacgggtcgaaaatccggccttcggcccatccgcatttttcccttgaaccaagaggaaaaacaggcgatcgggcggggccggaaggcgaacggttcccggcccttgatttatccccgaaaatgagtatagtttccgcattccgtcttttttgggatggcggaaaagaagaagaaaaggaggaaaacatgagaaaaatcacgctgttattggcgctcgggctgctggccctgggcaccgcccaggcggccatcatcacgaacaccaaccagagcacggcgtacatccggatgctgtcgcggaacgcgacgaccgagatcgatgccgtctactacaacccggccggcttggtccggctggccgacggctggcatttctccctgtccaacgagacgatctcccagactaagaccgtcgtcaacgacttcccgctgctcaataacggaacctatgagggcaaggtcagcgtccccatctatccggacgcttacatcgcctggaaaaagggaaagatcgccgtgtcggtcggattcggccccaacgccggcggcggctcggccgattaccagaccgggcttccctcgttcgaaacggggatctccatgcttccgaccttgattacgatgatgggcctgccgacgaccaagtattcggccgacatcgccttcaaggggagctcggtgttcctcggattccagggcaacctctcctacgccttgagcgagaccttctccctggccgccgggttccgctatatctcggcgaccaacacgtatgagggccggctgaaatcggtgatgatcaatccccagcatcccttgctgaatccctccggcgggatgatgtcggcggtgacgttcttcacggccatcggccagccgggcttggcggccatggtcgccgacaaggccgtcgacgccaagcagacgggttcgggcttcaccccgatcctcagcctccactacagccccatcccggagctcaacctcagcgcccgctatgaattcaacaccaagatcgagctgaccaacaaaacgacggtcgacgggacgggattgttcccggacggccagaagacgcacggcgacattccgggcttcctcgccctcggggcggattacggcatttcgcccgattttcgggcctcgctgtccttctcctattacttcgacaagaacgccgattgggacgggcgggaagacttgctcgacaagaattccatcgacctttccttcggcctcgagtatgacatctccgacctgatcatggtcagcgcgggctaccagctgtcccggtacgggcttgtcgacgactaccagtcggacatgagctatgatctgaacgccgacacgttcggattcggcggccggatccggctgagcccgaacttcaacgtcgacctgggcgccctgatcgtcaattacaaggattactcgaagagccttccttatcccgcgctcggggcttccttccgggagctttaccagcagacgaccttcgtcttctccatcggcgcgtcctaccatttcggcggagcggcccaggagtagagaagaaacgatcatcggatttaaaatgaaaaggcgggagggctttccctcccgcctttttctttgaggggtgaagcaggctgtttttcagggaattaagctaaaggggtaaaaggaggggttcctgtccagcctgcacaacaggagtgagtacactataacctatcgtttagataaagtcaagttcgttcgttccaccccccctcctcgttgacacccggccgtttcttctggtatttttccctgcaacatgttcctgctggtcggtctcattctcggtttcgtcgccgccatccccctcgggccggtgaatgccttcgtcatttcccagtcgatgaaacggaacttcttccacggcttcgtggccggggcgaccgccgccgttctcgatttcctttattgcttgatctccctgctcgggatcgccctcatcaccgtcaacatcactcgtttccaaatcccgctgaaaatcgcggccggcatcatcatgttgatcatcggctggcggctctacctgacgtcgaagaagccggtcatccccaagcaggaaaagctccctacctcctttacgcctcggccgatcctcggcgtcatcctgctctacgtctccaatccgtcgctgtatttcttctggatctgggcggccggttgggccgccgggcacggctggattctcaattacgccgccgccccctatttattcgccgcttcgtgcgggctgggcggctttatttggtacacggtggtttcctattacgtctcgcatcaccatcaccaattcaaaccccggaccttccagcgcatcttcctgatcttggccattgtcatgaccggattcgccgtttatacgttcgccggcatctttctccatttctaggagccggcgtgcccgacatccgtctccgtcccggccatggattcccctccgctttccgcggcggccgccttcccgccctcccatgaccttcgagaagggaacgagaatccggctgtcgatagagaaaatcgtctatcccggccggcgcctggcccggcatgaaggccgggtgtatttcaccaacgagggattgccgggggagaccgtcgaaatcgagatcctcaaggaacgcgcctccttcgtcgaggcccggaccacggccgtcctttccccctctccgcggcggatccccgcccgctgcggccacttttcggcctgcggatcctaccaagtcttgccctactccgagcagctcgatctgaagaagtcccagctccgggagatgttccggcgtcttgggaccggcccgtttttcgagccggaggtcaccgcttcccccctggaatggaactaccggaataaaatccggttttccgtgagaggatccggcccggacgcgttcctggcttatcattccccgggttcccgggcggcgttcgtcccgacggacggccgctgccacctcgcctcggaggcctcctgcgccgcggcccggaccgtcctggaggccgtccgggacggcggcctcacggatctcgaagacgtcgaagcccgggaaagccggaccgaggggaccctcctcctcaacttgttctggcggaaacgccggcccgagaaggccgcggccgcgattcgagacgccctcgccgcgcgttttcccgtctccggcctcgtttcctgggcgccgggaagaagcggccggtcccttcccttcctggaagacggccgggagattctcctcgagcgagcggccggtttgaccttcgaaatcggggccggatccttctttcaagtcaacggggcgatcctccctctcgttctggaggccgtctcggaagcggccggcctccggggccgggaaatcgtcgccgacgtttacagcggcgtcgggacgttcggcttggcgctggcccgctccgccgcccgggtcttcgtcatcgagtcgtttcccgacaacgtccgccggctcgaggccaatatcgtccgaaacggcctcggcaacgtcgaagtcctggacggatcggccgaagcctggatgaaagatctggccgggcgcggactggacaccgtcatcctcgatcctccgaggaaaggattggacccggcggtcgtccgggccctgattgaacgcccggccggaaaaatcatctatttatcctgcaatccggccactcttatccgcgacctgggccttctcggggcggcttacgccccggcctcggtccggctgttcgacttctttccccagaccccccacatcgaaacgttggccgtcctcgtccggaaatgaccaatcagccggcggccggcgagccggccaactgcccgcaagccgcttgaatgtcgcttcccttggagctccggacggtcaccgcggtccctttgttcctgagccgcccggcgaaggccgaggccgcctcgggatccggccgctcgaacggaagcccctcgaccggactgaaggcgatcaggttgaccttcgccccgagacggcgggcgagccgggccagccgctcggcgtcggccggccggtcattgacgcccttgagcaggacgtattcgaaggtgattttccgcccgccggccgccagataatcctcgcaggcggaaatcagctcggccaggggatatcgccggttgaccggcatcaggcggttccgcgtctcgtcgtcggccgcatggagggaaatcgaaaggttgatctggaggtcgatgcgggcgaagcgctcgatccccggaacgagcccgcaggtggagacggtcatgcgccgggcggcgaatccgaatccgcggggatcgttgaggacgcggaggacccgctcgatgttgtccaggttgtccagcggctcgcccatccccatgaatacgagattcgtcaagccggcgtccgggccgctccggaaatgcaggacttgaccgagaatctcgcccggcgtcaagtggcggtggaagccgcccttcccgctggcgcaaaacgcgcagctgaacttgcatcccgcctgggtcgaaaggcagatcgtccgccgggtcccggaggggatgaacaccgtttcgatattccatccgtcggaaagccggaacaaggttttcgtcgtcccgtcggccgagcaccggatttccacggcctccagcggccggagggaaaaccgggcggccagccggtcgcggagaggccgcggcaggtcggtgaattcggcgaacgaggacgcccctctccggtagagccaggcgaacacctgctcggcccggtaagccggctcgccgtcctcggccaggacggcccgcagctcgtcaaagctcaggtcccggatgtcccgcatggtcgatttgccctcggcgcgcttattgagccttcattatacacgaatcgaaacggccgaaatcgccttctccaaaccatgggccgccaagcggcctttaattcggggtttctccacgaagacgccgaccttcccttttccggccgatgagaatttcagaagaaggattcgaggcgttatccggcctcatcccgacatcaaaccgggttcggggacgcgagcaggctcctggatatttgacgggaactctgctataagtgggagcttccgatcgtcatgttcgacagcttgatgcagacgccgcacatcggagagatcctttctctcgcctcggccgtcgtctgggccgtctccgtgatcctgttccggatcgccggcgacacgatccatcccctggtgatgaacttgttcaagaacgttctggccctggttctcctgggcgggacggtcctcttcatcggcggggcgccggacctcccgccccggatcttcgccctcttcgttctcagcggcatcctgggcatcgccctctcggactggctgtttttcacggccctggtccggctcggagccgagctgacggcgatcgtcgactgcgcttacagccccttcgtcatcggcctgtcgttcctctttctcggcgagcggatgaacctcctccagatcgccggggtgggcttgatcctcggggccgtgatcctgatcacccgcaaaaaaaccgacgagcggctttcccgtcgcgccctcctgtccggcgtcgggatcgggatcgtctcgatgctgctcaccgcgggcggcatcgtcctcgtcaaacccttcctcggagggatttcggtggtctgggcgactctgatccggatgaccggaggggcggccgccgggctggtcttatgggctctgcatccccgccgccgggagcttttgcggccgctgcgggcgggggccaactacaagcttttgattcccgcctccgtgctttcggcttacttctccgtcctcatctggatggccgggatgaaatatacgctggcctcagtcgcctccgccctcaatcagctcaacaccatcttcgtcttcctgctggccgccgtcgtcttgaaggaaaaaatcacccccctgaaagcggcggccgtcgccctggccttcgccggcgccatcctggtctcgatccggttctgagcccgtcccggggaaaccggccgggccttcccgcgccgcccgggaaccaaggcggccgaatcgctgcagggaattctcggcggcggtcccgccgtcgatattgcagctccgccttggaattattacaatgggagagtgaagatgccgcgctctccggttcttgtccccctcctcttgttcatcgttcttctcctcctggcgtcggccgcgggctggatctattattcccaatccaaggaacagatcctggcgacggccgcggccaacctgaacgccgttggaaatctcaaggtctccctcctggacggctggcgccgggagcggctccgggacgcggccatcatctccgccaacccgttcaatcaggcgatgatcatccctttcctggaagcggatcccgcggtttcgacggccgacccccggatcaaggcttggctggattccctcgtcaaggcgaaaggctacatggacgccgtcctgctcgacacggacggacgagtgagaatggcttcgggctccagcgggcccgtcatcggaaccaacgccgaggaaaccatcgaccgcgtgctcgccacgggcgaaccgtatctttccggctttcacacctcctccgaaatcgggttgaaggcgcacctcgatctgtacgcgccggtctccggccgcgggccggacgggaaagtctcctgcgacggcatcttcctgttccggatcgacccggccgattttctgattccaacgatgcggagccggggcgcgcccggccggagcgtcgagacattgcttgtccgccgcgagggagacgacatccttttcctgcaagatccgcggttccgcccggactccggcctcaagctgcgcctccccgcggccgaggccgaccttccggcctccatggccgaaagggagaagaacggcgcgttcgagggaacggattaccggggcgtccgcgtcctctcggctctcaaagccgtccccggaacatcctggcgggtggtcgcccaggaggacttgtccgaaatcctggagccccttttagccagaatgtcgtctttcgtttccatgatcatcatcctctgtttcgggaccggggtcatgctcctgttttggatcaagcggcgcgaggcggcttatttccgcaaacagtatgagatcgagcacgaccgcttggccctggtccagcacttcgaatacctccacaagtacgccaatgacatcgtcatcctagccgaccgggatcaccgggtgatcgaggccaacgaccgagccctggcggtttacggattcagccgggcggaattgatcgggttcagggttccggatctgcggccatgggaagcccgggccgacttcccccgccatctcgaggaggcggaaaagaccggcagcctgattttcgagaccctccaccgcgacaaggacggcatcgcctttcccgtcgaagtcagcctccgcttgatcgatatcggcggcgcccggtatcaccaagccatcatccgcgacatccgggagagaaaacgggccgagaagcggatcctggacgcccttcgggaaaaggaagtcctcctgcgggagatccaccaccgggtcaagaacaacatgcaggtcatttcgagccttctccgtctccagtccgccaggttcaccgaggccgaggtccgcgaggccttcctggaaagccaggggcggatcaagtccatggccctggtccacgagaagctctacatgacgaaggacctgtcccggatcgatttcgccgactacatcaagtcgctgacctcgacgattttcgcctcccatgaggaggacggccgcatcgccctgaagcttgacctggataaggtttatctcgacatcaacaccgccgtcccctgcggcctcattctcaacgagctcatcctcaatgccttgaagcatgccttccccaacaaccggcggggaaggatccgggtcgagctacgggaaaacgaaaaggaaatcatccggctgacggtccgggacgacggaatcggccttccggagggatgcgagcccggaaaggttgaatccctcggatttcagatcatcgccctgctggccgaacaactcaggggatggatcgacgtccgccgcgaggggggcgcggcgatcagcctgtggttcaagctgccgtccgttcccgaaacgaactgacggcgtccgttctcccgggcgccgcccggaaagcgcgcccctaaggaaagtctctcagccgaccagccgatgaacgacgtccacggcgctggccgcgtccggggcgtatccccgagccccgatttgagaggcgtaatcggccgtcaggggagccccgccgacgatcaccgggacatgcaggccggccgcttccagggcggcgacgaccgtcttcatttgaaccatggtcgtcgtcaggagagccgaaagagcgatcacgtccgcttcattggatttcgcggcctcgacgaacttatcagcggccacatccgcgcccaagtcgatgattttaaagcccgctcccttgagcatcatggccacgagattcttgccgatgtcgtggaggtcccctttgaccgtgccgatgaccacgcatccccggggctcgatgccctccttgatcagcaggggttcgagcttgacgagggcggcgttcatggcccgggcggcgacaaggacttcggggataaagacttcgttgttcttgaacagctcgccgagcttttccattccggcgatcaggccttcgttcaaaatacggcgggtgggcagacccccggcgatcgccctgtcgacgagagcctcgacgtcggccttccggccgccgatcaacgcctcctgcatggcctcaagcatgaatccctcctggctgatcctccgcggcccgggccgcggacggttccccccgaacccgccctcccggccggaccccctcccggcggctcgacagacggccttcatgcccggggggaggaaacgcggaaatctccgcgaatataccaggacgaatatccgaagtcaaacaaaccggggaatcgcccggaaaaccggcgtccggcggcgtccgaggtcccgaaacatggatttttccccggcgttcccgtataattttgaaaccgagggccgccactcggccgcttgaggaaggagaaggatcatggccaacaccaaatccaaaaaaggcgtcatcgggattctgaccggcgggggcgacgtccccgggctgaatccggccatccgggcggtcaccctccgggccctcagcgaaggctacaaggtcatcggattgaagcgggggtgggccgggttgatggaaatggtccgggacaaggaagcggacaacacggcccattactgtctcttgaccgaggaatacgtccggaaagccggccggaccggcggtacatttcttcatacatcccggacccgccccagccatgtcccgcaggcggccgtgccggcccatctccgcgaggcctacaaggaaaagaccaacgacctgacgccggatatcttgaaaaacctcgattacctaggcatcgattatctggtcccgatcggcggagacgacaccttgagctacggggttcatctccaccagcagggcgtcaaggtcgtggccgtgcccaagacgatggacaacgacgttcccgggacggactattgcatcggattttcgacctgcgtcacccggacgatcgccttgtccaacgcccttcggacctcggccggctcgcacgagcgcttcctggtcatcgaggtcttcggccgttacgccggcttcaccgcccttctgcccaccctggccgcggcggccgaccggtgcctgatccccgagcacccgttcgacatggagcgcctcgcggagctgctgtcccaggaccgggccgagaacgccagccgctacgccatcgtcatcgtcgccgaaggggcgacgccggcgggcggggacatggtcttctgcgaccacgagaccgacatgttcggccacaagaagctcgggggaatcggcgacctggtgtcccaaaagctcaaggagctggcccccaaatacaacaacggccggaaagtcgacgtcctcaaccagaagctcggctacctcgtccgttgcggagagccggacgcgctcgattacatcattcccatggctttcggcaacatcgccttcgacctgatccaggaaggcaagtccggccggatggcctgtctccgcaagggcgaatacgacgacgttccgctggaggtcgtgaccagccgaaagaagatcgtcgacatcgatacgtcctatgaccgggaccggctgcgcccgctctactcccatttcagccgaaagccgttcctgctgatcgaaggcgcttgagtccggaccggacgccgtttctccggcggtccggctgtgatatcattcgccgcaaatgctgaagaaggaggacgctatgtccgctgaaaaccgccgttccgatcccggccgcatcttctggggcttggtcctgatcctgatcggggccctagtcttgttcctccgctacgatttctgggatttcggatacctgctgtccacctggtggccgtcgatcctgatcctgatcgggatttcggtcctgatcgggaaccgcttccgccgctggggggccggactcatcctcatcctattcgggggcttgttccaggcctgggagctcggttacctcgaagtggacgtctggcggaaaatttggccggcggtcttgatcgttctcggcgcgtggatcatcttccggccgtcgagaaggcggcaggaccgtttccgggccgccccggcgccggggggcgatatcgacgtgacggccgttttttccggggccaagcgccgcgtcgaagcccggaatttcaagggcggagaggcaacggccgtattcggcggggttgatctggatttaaccggggccggcctcgagggcggacaagcgaccatggaagcgacggcgattttcggcggggtggacatcatcgtcccccgggattggaaggtcgtcctggacggaacgccgatcctgggcggggtgtccatgaagcatgcgaatccgcctgaatccgaggtccaatcaaccttgcacgtccgggggacggcgattttcggcggcgtcaccgttaaggattgaccggatccgtcatcatgagaagggcgcttctctggatcctggcggttgttttgaccctggccgcggccgtctaccagcggatatccggaccgacctaccccctccggggaaaggttgaagtctccgggacggaagtcccctatcgccttccccggagcgcggaaacgggccgcgacctggaaatcccggtgaacaacgccgagggacggctttccggcttcatcgaattcaagcggcatccgacggaggatccatggacgcgggtggagatggtcccggccggggacgtcctttcggccgagcttcccgcccagccgccggccggcaagctcgcctaccggatcgtcttatcgaaggatggccgggagatgccgcttgccggaagagaatccgtcatcgtccggttccggggcgccgtcccgcctcttatccagatcccccatatcatcgtgatgttcctggcgatgctgttttcggtccgggccggcctggccgccctgaaccgcagggaacacccccggaagctcgtcttggcgacctgcgcccttctctttctcggcggattcatcctcggcccgctgatgcagcagtatgccttcggaaagctctggaccggattcccgttcggaaccgacctgacggacaataaaaccctggtcgcgatgatcgcctggctggcggccttgtgggccgggcggaagggacgggcggcccggggctgggtcctggccgcttcgctcatcctcttgatcgtctattccatcccccacagccttctcggctcggagctcgactatacgaagctctagctcttcaatttgaaccggcccatggcggagaagaaagccgccgattcccggttgaaggcgccacggatccggcggcgtcgcgcctcgacatccttgtccgaggccttggtcgccgcaattcgatcttgaagaagggcggactcgccggatttacggctgaagtccggacatccgcggtcccgtcaaacaccctctccctgaccgtcgttcttccgagagggcgagggcgccggcgcgcctttgatcctttgaaggagctcgacggcccgctccttgaattgcggatgtccggccgcccgttcggccgccgcccgggccgcggccgtgtcgccggcattggcccatgcgaccgcggcgttgaaagcggccgccgcggccacgatttccgccgtccggagctgcgactcgcgccgggcgagcattcccgccttgcgttcagcggccagccccgagccggcgatttcctcgatcttcgccttcaacccctccgccttcccctccatggccgtgatcgtccgctcgtaccagccggccgcatccgtccaccgttccctccgctcggcgatccgggccaagcccaacaaggcctcgtcgttggccccgtcgaattccacggcctgctggaaatcggcttcggccgcggccggttcgttcgcttccagggccagagttccggacaagctgaagacatgcgtgttcgtgggcatcggccccttcgccgcctcgatatgcccccgggcggagtccctctcgttcaaggcatgataattccaagccagccagtaatgggcctccccctggaggtagtaacgcatctcgatgatccggttcagaacgccgatcgcgtccgtgttccggccgagctgggaaaggccgatcgctttgatcagaagggcgtcgcggtattccgggagcagggcgagggtcttctcgcaatagaggatgcttttctcgaattcctcggtaaaaaaatagaggctggcgagcagaacgggatacaaggccgattcggggatgcgggcgaaggcggtcaggaggtctttttccgcgcttaggatctccccccgtcccagggccgcctctccccggaagccgtaagcttcccagaattccgggtcggcctggaggacctcgtcgaatcgtccggccgccggcgcgggacagaatcccgtccggaacaggatcgggatcgaaccgggatgcgcggccaggattgccgcccggtcgtcggcgcggtcgtaggaagatttcccgggacaagccagggccaggtaaaaatacgccgcttcgccgtcggcgggagcccgggcgtacaggtcggcccgaaggcgatcgagttcttccggatcgaaggtattttccagccagggaatggagtcccggacgacccccttgacccggagcgggatttcccgggccgcggccagccaattccggtacccggtcaggccgggattttccccggccaaacgctcggcccgggcgaaggtttcggttccgccgatgcccagctcccgttcccggaggaaaaggagaaaaaccgcccggaaatacggggcggcgacgcgctccctcaggccggccttggcgtataggccgccgtatatccggcaggcgtccttcaggaagacgtacgatccccggccggccaaagccgaggcggtctcggccgttttcatgtcgtcagccgggggaacggctgtccggacggcgcgtcgggggctcgaggtgcaggaaacgagaaggaaggaaagcgcgagagcgagagccgcgtttctcatcggaatcctttctcccgtccttccgctctcttcgcggattcattgtaatccgatcgccggccggaatcaagaaaccgggggacaagcggaggagggtaagatttttaacggcgccgttcggtcatttgacatcccttctgcggctgattacactcggccgcgggacatcaaggaaatttcggcccgcggcggctcgagacctgaaggaggaaaggcatgacggtttataacctcgtcagcttcgccggcatcttcgtcctggccggcgtcgcctggcttttctcgtcgaaccggaaaatcgtcaacgtccgggttctcttctggggcatcgggctccagcttctcgtcgcctgcttcgtcttcgtcatcccggccgggaccaaggcgtttctgtgggtgaacgacgccgtcaccacggttttgagcgccgccacggcggggacgaagttcgtcttcggccgcttggccctgccgccgggcgcgacgaacgaagccggcgaaacctccctcggctattttttggctttccagggcttgccgacgatcattttcttcgccgcccttttgggcgccctctactacctgcggatcatgccgttcttcgtccggttgttcgcccggctcttctcccggtcgatgaaaatcagcggggccgaggcgctctccgtttcggccaacatcttcgtcggcgtcgaatctgccctcgtcgtccggccccacctcaaggacatgacccggtccgagctcgggaccatcatcaccgccggcatgggcacgatcgcctcgaccgtcctggcgatgtacgtgatgatgctccagaaatccatcccgacgatcgccggccacctcgtctccgcctcgttcatctcggctccggcctcgatcgtcatggccaagcttctcatgcccgagacggagaagccgctgaccctggggctcgacgtcaagccccactatgagcgcgaggacaacctgatcatggcgatcatcaacggcgccggggaaggcctgaagctcctgggggggatcgtcaccctgctcatcgccttcctcggaatcctggccctggtcaacctcggcctcggatgggccggcggcctggtcaacgggctcttcggctggcatttcgactggtccatcgaagctctcctcggctacctcttcacccccctgaccctggccatgggcgtcgttccggccgacgcgttctccatcgccaagatcctcggcgaccggacgatcttgaccgaggttttttcctacgggcgcctgtcagatctcctggccgccggcgcgctcaaagatccgcgctcggccatcatcgcctcctatgccctctgcggcttcgcccacgtggcctccctggcgatcttcgtcggcgggacgggcgcgctcgccccgacgcggatccgggacatctcccggattggatttcgggctttgctcgccgccaccctggcctgcctcatgaccggggccgtggccgggacgttttatacgggctcgtcggttttattcggacgatgagagaccgcccggccgggctgacgtcatcctgttcgtttccgccggggatgagcacccttcggaatgtccccggggaacaagccccggccccggcgcttgcttaataaaagcccgctcctccggtttcaccggggatcgttggcgaaatgggcgtggacgatcagccagtttccgccctcccgcatcatggcgaacgtcaccggacctttttggacggggcccgggccggccacgtcccggtcgaaataccagaaggccgtgaccagggccatatcctcaacgcccaggacatcgagaccgtcgagccagaggcggttgtccgcggtttttcccccgggaatgaagccaaagctccgggaatggtccatcagggcgtccatcccctggatccggccggccttttccgaggaaaagtaagtcgtcctgggcgaaggctcgaaaagcttttgagtcaggtcgaggtcgtacacgttccagctcaaggtccaagccgcgagcgtcgcgccgggtgaactcctgtccggctcggcccggacaagatcggccagttccgcctccgcggcgatcacggaaaacgacgcccagtcctcgcggcggagcatctcctcgaagagccgccgggccccggttttgtcgcctgtccataaacgagccatgcccaggccgtaagaacggatcgccgtttcgatggcggtttcgccggaccggccgcggccgaaatcgtccgtttcgatctctcccttgaacatcaaaagacgctcgagataggctccgttctcgagaagcttcatcctcgaattgatcttggacaggagggcgcgggcttcatccgcctttcccgtccgccgcagaatcaaataaaaccagtcggtcgcggccacgacggagtcgtcgttgttggaccatttgaggcactcgcggaaggccgcttcggctttgacgaagtcccgggtcaggtaataagccaggccgagatggtaataaatgttgaactgggtgttggaaacgggaatgcccgacggattcggatttccgtcggcctcgacctccaacggcttgccggcggccagggcggccgccttctcgaaatcggagatcgcccggccgaactggcggatcgaaatatagcggtggccgcggtggcggtacagacggcaggaatcgggatgctttttcaagccttcgctgtagacggcgatcgcttcgcggaagcggccgaggtacgccgtgcggcggccgagccagatccagttgtcttcgctcggatcgacgtcgaaatccttgagggcgtcctcgtagcttttcacggccgccggggaaggggccggggaaataagcggacggccgaacagagaaatcgcttcatagggcttagaggcgaaggaggaggcggcgggattcggttgaccggacgcgccggccgccgaagcgaggctgacaatcaaaagggccgcggcccatcggaacacgcttttcatcgagattctccttcccgtccgcccggccgttttcttcaagcccgatttttcgcctgaagacggccggcggggctttgccccgccgatggaggtgctttcgatccccggcttaagcgagcggccgggatttctttggaatcaatgatcttccgcggcggaggataaatcgtcgatccggggaagtcaagatctatcccgggacgacaagacaacctgaacctgtccagtaatcaatccggccgatgaaagaaacacacccgcgtctcgggatgggtcggcgaaggcatggaaattgatattttcctcggcgtttttactatcacgacaggaaaaacgggaggaggaagcttgatttcgatctttttatgttccgactctttcccctgataccgaaatgacggccggccatcaaatccttcccgcgcgattatgtctgcttttctcaacgtcatggcggactgccgcgggacgaaggttcgattccgccatatgatcgggtaaccgctgttgaccgtccgtctctctcgaagacggaaaagatcctcgagtaaatggttttttataaagaaatgggctctgggaaagcctgtatcgctcaatacgccgagaccgcccgcaatcgccgggaaatcgccttcatggtcacaataacaaccaataaggcggaccatgattatctattagtccatcaagatcaaattcgagggtcctcacagaaaatcttgttttcgtcgatttgaacattcagtccgatctcaaggaaagcggttgctgcggccgcaaccgcatgaaattgaattgaaatcagtattgaacatgactattgacatgactagaatattttttataatggtatacgtttttagcaatgaaatacgataatcgtttacttcgcgaatattcgttttctcatctaaagtcccattctaaagaaaaaatcatcgctgcagcaaaggaattatttaataaacacgggctcaaacgcgtctccgtggaagaaatttgccatgtggccggagttagcaaaagaacttactataaatactatagcaataaagcttctttagtcatctatatcattcgatcttttgacatcgaatataaaagaaaataccggaacattactcgacatgcgaaaaccttcaaagaaggaatcatcctgggattcaaactgtggcagcaatggttcaacagttggagtccggaattaaaagcggatatcgcgacatcgaccgggtatggattgaaagagttctatcggactcggcaggaaaatgaaatcaacattttcttgagagacattcaggcggctcaaacacgcggagaaatacgaaaagacattaaaatcgaactcatccgattcatgtgggaacattacgccgaacttcttaaggatgaccggttacgtcgatattatgacgatttccgacaattagaatacgagctttcgacgtttttttggttcggcattttcccctgggatcgcgaaaatgtcaatcatgacgaattagcgttcaaaaaaaacaaataaggaggatcggatgaagatctcctggagaacgctcttagtcttttctctctttctggccgttgctttacccgggcaagcggccgatcgccccctcgagacatggttgacggctcgcgtccgagctttcaatcccgtgttcgatcaccggcctcttaatctcgaaaataccctctcttttcgtccggaagatctctggccggcggccggctcccccttcgcctggtcgcccggtcaaaccgtgttatggacgccgatcaaagcaatcgatggattgatccctgccggggaagacaagtcgtcaggtcttcttctcgccgcaacctacctggcggttccccggtggcaacccgcggtgcttcatgtcaagagcacagctccttttaaggtctttcttgatggaaaagcgttagatgcgctgaaccggatcccgctggtcttgtctcaaggaaagcaccgcctcctcgtcgcttctctggatttctccgatcggaccggcggcatcaggatttcattggaagtcgaggaaaaatttaaaaacgattggccggccgcttctttggatcccaaacaccctctctctatcgaggatgtcgtcgccctccaacagccttcgttatcatccttcgaaccgggaataaacatcgccctctcccccgatgggacgatgacttcgatcatcaacctccaagggggacttgatatgattcgcgtcgcggatgggaaactcatgaggagttttaccatcgccaagcctctattggcattttcttggtcgccctcatgggaacgtctggccgccgtcgtcgacgcgtcatccgacggccaagagatttggatctttgaccggacgacgggatccgggcatccggaattcaaaggtttgaaaggggtaacccaaatcgcctggcatcccgacgggatgcatattctctttacgacaaccgatgtccccccgcgaaaccaagattacgatgttgtggattctttttttgatcgctggcccctgtggcggaataaaatcagcctgtggctgggttcattggaaaacggaaaccgccatatcatccactcgggagcttctccgttccgggattctgggagatcaacgatttctccggacggccgtcttgccgcatttatccattcaactccgacaaccgaatttccatatgagcatcaagaactctggattgtcgatctcctttcggggcatcctcgtaaggtcatggacctccgtatttctcatgtcggagatatagcctggagccccgattccaaacgattggtccttgtcgccccgcatttcgacttcccgaaaactcccgcagatcccgtccacagccgctggaatttcggcctaatgctcgttgatcttaccagcggcgccgctcagaacattctaccctccacgtttacgccgcatgtcgaatccctctggtggcatccggaaggtgagctgttttttgtggccctggaccggactgtctatcgcctttactcgttggacaagagcctggaccgtccccgggaaatcccgttgcctttcaagaacgtggaaggttttctcggaagtccccgtggagattgggctattctcaaactcggagaaatcgatcgtccttcctggctggaagcttacaatctcaggacagggacccatcatgttctttgggatcctgctggaaaactcctctctcaactgacattagggaggaccgagctgttttcaagcaagaaccgccacggggatacgatcgacggttggatttacttccctccggacttcgatccgaataaaaagtatcctatgattgtttattactacggcggtgtcgttccccagagccaaacgttcctaacggggaacgggggcgttctcaatcactggttcgcagcaaacggttacatcgctttcaccttaaccccgcggggaacgtggggctatggtcaggaatgggctgacgctcatatcaatgaatggggagaatcctccgccaatgacattatcgacgtcattcaggcgcttctccgggagaaaccgtacatcgacccaaagaagatcggcggattcggacatagctacggaggatttgagggcctttctttgtcgacaagaaccgacctcttttccgccctgatcgcttccggagtaatcagcaatcccctcctgtattcatttgtcgtcctcggccaaccgaattatggggaaatcgttcttccggggatatatccttggaatagaaaagacgtttacgttgatcgcgcacccgttttcaacgctgataagatcaatactccgatcctccttgttcaagggagtgcggatccctggtgtaccctcgccgaatcagaccttatgtactcagctcttaaagtgcagggaaaagaagccgttcagatccggtggattggagaaggacacgggatcatcaacccaaggaaaaagacgttgaattacgaaatgtggcgggaatggtttgacaaatggttaaaggatcgtggagaagcttgggatcaccggatccggcaagagatgccatgagaaggaggtcaaaatagggaaaagaacaatctgcgtggaatgttcgtgctcaagttccgggaccgttcggcaagtcggatctagcgaaaaggagagtggaatgaaggcgatcaagtggatcaaattggttgtcataacagccacggctgtctttatgctgtctagcacttctcttgcgcaagtcgttacggcggatatcatcggaaccgtaagcgacatcgatggacaacctcttccgggagctacggtaaccctacaaaacacgatgacggggatgacacgatcattcatcgcggatcctaacggcaagttctcttttcgagccatccctgttcagggcacctatcaaatcacggccgagcttgctggattcaaaacccatatccagaaggatcttcaacttcatatcaacgaaacctcgtctctgcatttccgattggaggcgggcgcgattgaacaatttgtgacggtgacggcgcaagccccgctcgtcgatattaaagaaacgacggttcagcaggtgttgacagaagaactcgtcacttcgcttccattgattggaagaaactatatcggattgactcatttagcccccggagtcaccggatccgattattggccgacgacatccggccaacactactgggcaatgaactatattgtcgacggcggcagtaatttctccaaatggagaagcgcggcccgaacatattattcgggctacagcctggacacgattcaagaaattcaggtattaaacaaccagttctcggtcgaattcggggaggggatgagtgccattagcagcgccatcacgaaatccgggacgaatgagttcagagggtcgttatatttctacgaccgccctggtgcctgggacgaaccggacttcctaacgcattcaaaagcaccctacgaccaacagcaaatcggattcacgttgagcggccccatcgtgaaagatcgggcgcatttctttctgaattatgaatatcgtcgtcaaagaagccagagtactgtcattgcgcccgactatttcggcaaaaccgttcccaacaatcaggatgagcatatggttttcgccaaggttgattaccaggcaagtccgtcagattatataaccctccgctatagcaacgatttatttgactgggcccaagaatttggaggttataatattcccggcgagggaatgtcctatgtgacatacgtccacacgggttatctgtcctggttgaagacgcttgataaaggcaaagtgaacgaactccgactgcaggtcgcaagttaccatgaccttcgcaaggctttaacccattaccccgatcgggcagcggaagaccgttatggttatgcggttctcggaggagacgcctattactcggacggtttcggggtcacccctgagatgacctatgagatcttcgacaagctcaccctctcccgcggcaaccactttctgaagttcggcggctttgttaaatatacgacggcaaaccagattcagctggcctatgcagacggaatttattactttgccggctctccagataaatatcctaatccatatcttttcatgcagagcttcgccttggataaaagcttgacgggggtcaaatcgagagatcttaactgggctctttttgtcgaagacgagtggagcgtttccaatcgtttaacgctgactctcgggcttcgttatgacgtgcagcatatcttcaatgtcgtaggttataccgctcccgtcgacggggacaatattcagccgcgcctcggcgtgacatacgatctctttggaaacgggagatccgtcgtccgggccggattcgggatcttctcccagcagaacctttccttccattacacgaaaggcgcttttttgggtaaagcgggtcaggtctacctgactcttactcccgacatggccgaattccccgattatccttacggcttgccggagttccccgatggcgccgatcttccggctcgtaatatttgggagatagacgaaaacctcaagaatccctatagcatgcaatggacggcgggattccagcacgaactcctccccaatctgagttttagcattgacggtatctatatgacggttatggatggattgagcgttatcgacgttaacgccccagtctcgacggatgtggctcgatcgatcgccgaggctgatgccactcgccccattaccccgaccgtaaacgggtatcggacgatcaaccatctcggcaatttgagccgtagctggtacaaagcgctcaatttcaagctcgaacgccgggggacggattacatgttcctcatgacgtacacgctttcgaaaaccaccgacatgctcaatccctggagccttcctcaggacagccgaaacatcgaagatgacaagggaccgggcggcaatgaccgccggcatcttttgaatttcgctttcttctataattctcccttcaaaagcgcgatcttgaaagactggcagatctccgggatcgcgaaatataactcggcggctccctatacggaaacatacggccttgatctttggggaacaggtttgggaaatgctcgtcctttcggcagaaataacctcaggggcgatccttattacaatgtcgatctgagcctctcgagaaggatcgctttattgaatagagcttccctggagtttaagatcgacgtttttaacgtcttcaatattaccaactacacgagtttcttgggcgctcggaccgctgggaatagattcggaaatcccactgccgccgcgcccggacggcgcttccagttgggaatgcacttccggttctaaacgggcatatcatatttccatgaaaactcacgggcccccgatgtttcaagcaccgggggcccgtgcttgatgcgtgttatttgaaatcgttacgctaaagagaaagggcttttcggaatatgaagatacgcgcgagaaagaatgaacgcttcgtttttttgatatcccttgttctcttctccggattgatcttttccacctgcaataatccccgcccgacgaaaatcgagccgaactggcccgatcgcagcggaacttatgaatacagcgccttctatgaggagggaagcaaagcgggaacacaaactcacgggcatcaattcaaactcagcctggaaaatggagcttatgtcctggattggggaggagtacgcgtcacgggggtccagatcgccgatggactgatttataaatggtcctccggccgtttttcgggtcaaggcatatacgtcctgtatgacaacgcgacgaagctattcggaacgtttcggctcattgacagcgacggcgaacaaaggggcttcacgagaggcgcgaagaaaaatccttctctctcgccggaccaggatgccgttcaaatcccgattcagtaactttctttttttagcttttccactcgagctcgaatctcgggttgttctgcgtttatcgataaagaacgttcccacgtttgaagggcttcggcaagccggcctaacttgtaataacaatctccgatgagattgaggatgacaaagttcgttccgtaacgaatcagttgttcctcgtaaagggcgagcgcttcggagaagttgccttgcccgtgaagacttcgagcaagaagttcttggacttcagagaacggctgtgtcgagaacggcgcaagcacgacggaaatacggtcgaactttttttgcgccaggagcgcccgggcatagtccaccgcatatgccggttgctctggattcgccgccgagactgcctcgaggagcgcctcggctcgggcaggccggccgctattgagaaactgcaaccccaaaatatggggatagtaggaatctccggccggagggaggacagaggcgctgatccagggacggggaatcgtggaagcagaactgatcataaaaggtttttcttcggacagaacttcctccccggccgcacccacgagagcggccttgaggacatagtacgcgggagggatatcccggagagaaattttttcgataacgtcattgggggaatcagaaagagagaacccgctgtcccattcgcggatgacggcatcgtcggaatgaatgctgaagcgcaaggatcctttttgatccatcccttccggaagcgccgaaacccgcgttagtacgatgatttgatcctcagacgaaaaatcgtttagagaaaccggatagagctgcgtctccttgattttaaacgctctccttgttttttcttccggcggcgctttttccatgcggtaggcgaaaagcatcggcgagaggaacagcggcgattcctccgccaccctgatgttttcttccagggtcgtaaattccttcgacgcctcgtttttcgctaggacctggagacggaaggcgccgtcaataacgggaaaagcgtcatggaactgaaaggagagatcccgaatttcggcgtactggtcatccgttaattcgagagggacattcttttcgaattgataaacgatgcggtcgcgatcatccttcatggaaacgttaacgaccagccgtgtgcgccacccgccgtctatatgcctgaagacaagcttctccagttcaataagataatgcacgaaagcaacgccggtttcatcgcggataacaaaggccgatgagtggctgggcaggtagttcacggaatactcaatatcaatcgtgcccgcgaatttcataaactggggagcgtagtcatcccgcacagatttttgagggacggccaggacatccatcaggagccggtcaaaagccaaggaggccgtcgtttcaagcgtgttctctcccgggataggagataaggaaagcttggccagcaaggcgtcgatcgagagaagtcgtcgataagccgaggagggcgattgcgataccgcgtgatcggcgagcaggctctccggcccgttgatcgtcgggctgtaaatcttatagtcgcccacaccgcgatttttaaaaaagacgatgtaaaatgcgtcgacaagattgtatcggctcatgccctggtagaaccaagcgatcgtcggatagagctgggaactcccttcgaatgtctgaatagattcgggcggtcccagaatgatatatatctttcctctatcgctcttccagcctggaaccgcggacccggcccggaaattcgtgttggcatggatcaagcgccgctcatgctcctctttgaattcattccgaggagtggttttgtcaggatcacgatgattccaaaaagcccggatgaacagatctctgtctctatcggatttaagcgctagaaaaacttcccgttctttgggagtgatgatatagggcacttgttcttccaaccatttgcgatgaaccggggacatctgcatgtcttgcgtgcaaaacgcagggaaaggagtcattgaatatgcaaataaacagacaacgaggaaaacccttatggcggtcttaaatcgctttgtcatcgatattcaagaaatcgaattcacaaagattatattatccttcaattccgtatggacatcaaggatcgccatggccgggcttgaaaaccaccggtctttcccttaccatgacttcctttgccagaaagacatccaatcttttcgggaggctccatgaaaatcctgcgcccggctttcgcccttcttcttctcgttttcctggcggttctttccggcggcgttccggccgcgggccaagaagccccggctccggcccaaccggccgggccgcggccgatcgagctccgtgacatcctcgcctggaggacaatcgtctcggccgtcgtctcggacaacggccgatggttcgccgcccgcctcgctccccaggaaggaaacggggaagtcattttcaaggaaatccggggggacaaagcctatgccttccccgccggggaaggccggaaaggcgcggtcgcgatttcggccgacggcgccttcggcgccttcgcggtcaatcccgagcccgaggaagcccggcgcctccggaaggaacgcgctcccctcttcgccggagcggccgtcgtgaatctggcctccggggagaagaccgtctacgataaaatcaagtcgttttctttcccggccgagaatccggcctggatcgcccttcacaagaccgccccggagggacaggccaaggaaaaggataaagggaccggctccgacctcattctccgcgagctggccaccggccgggaactcgttctcggcaacgtgagcgagttcgccttcgacaagaaaggcgcccggttggcgctcctcatcgacgccgtcggacaggccggcaacgggctccttctccgcgacatgaccaccggggttctcgcggttctcgattccggaaaggcgtcttatcaacgcctttcctggacggaaaacggcggcgctctggcctgcctcaagggccgggaagacaaggactacgaggacaagctgttcagccttatcggcttcacttttccggccggcggcccgagaaagcacgcctatgatccgcaagacgacaagagcttccccgcgggcctgacgatcagcccgaaccggactccgcgctggaccgaaagcctggacgctctcctgttcggcattcatgcgccaaaaaagaaaagcgccgggtccggcccggggccggttgcgccggttaagcccggagaggagccggacgaaaacattccggacctcgtcctctggcatttcaatgatccgcggcttcaatcccagcagcaagttgaagccgagagggacaggaatttcagttacctgtcggtctaccggatcaaggaaaacaagttcatccgcctggccgacgaagacgtccgcgacgtccgtccggcgccgaaagaccgcttcgccctcggccgcgacgtccgggcttacgagctggacggatccctcgacggccggcggtacgaggacctgtacgtgatcgacatgatctcgggaacacgaaccctggccttgaagaaaacccgctggcccgtcctgccgtcccccgacgggacgaagttgctccactacgccggcggcgtctattccgtctatgacatggccgcggccgtctcccggccgatcacccgggacgtcccggccgatttcgtcaacgaggacgacgaccacaatgaaatcgatccgcccgatccccccgtcggctggatgaaggattcccggtccgtcctcctctcggacggctgggatgtctggtccgtccccgttcagggcgggccgagcctcaacctcaccgggaacggccggaaagagggcctccggtatcagcgtctgcgtctcgatcccgacgaaaagggcatcgatcccgcccggccgatctacttcggaacgtacggtgaatggacgaaaaaagcgggattctccgtgatcgaaaagggatcgcccgggccgcgcgttctcgtctgggaggacgccgccttcggacctctcctgaaggcccgtctagcggatgtctatctcaccacccgcgaaacgttccgggatttcccggactggcgggccgccggggcggacctgaaatcctggatccgcctgaccgaggccaatccccaacagaaggattttctctggtcgagcggcgtaaggctggtcgattatgtcatcgatccgaagagcggaaaaaccaaccggctccagggcgcgctctttctcccggccggatacgaaccgggccggtcttatccgacgattgtctattactatgaaaaaatgtcccagatgctcaaccgccatctgccgcccgcgtccaacggcttcaacaagacggtgtacacgagcaacggatacgccgtctttttcccggatatcacgtacaagatcaacgatcccgggatgagcgccgcctggtgcgtccttccagccctggacgcggccgcggcgaccggggtggtcgaccgggccaaggtcggcctccagggtcattcatggggcggatacgagacgtcttttctggtgacccaggctgatttcgccgcggctgtggccggggctccgctgacaaacatgatctccatgtacagctcgatctatttcaattccggcgtttccaacatggccatcttcgaaagcagccaaggccggttcaagggcggttattgggacaacctcgaggcctaccagcgcaattcccccgtctatcacgcgtccgccgtccgcacgcccctgatgattctccacaacgacaaggacggggccgtcgactggaaccaggggatcgagtatttcaacacgctccgccggttgaaaaagacggtcgtcatgctccagtacaccggagagaaccacggcctggccaagccggccaaccagcgggattacaccgtccggatgaaggaatggttcgaccactggctgaagggctcgcccgccccggactggctgaaggaaggcgtcccccacctgaatctcaaggaccatctgcgggagcggtcgaagctctggcggccggaggacaagaaggagccggaaaaaggcgaagggaagaaataagaacgaacggcggctttatggcgccccatgccccgtaaaatagaggcgctggctgtcgaggcgccaaggtttgaaaaggaagcggggcttgaaagatcctctccagccagcatccgcggatagaatagtacgaagtcaagcaaaagtcaaaaggcaagaggggccgcggggcctcaattctgaagcagccgggcgatcagctcgagcaaggtgttcgtccggatgggtttgtcgatgaaatcatccgccccgacggcccgggcttcgcggaccaagagcgggtttttcagggccgacatcacgatgaccttgattccgctgagctcgggatcggatttgatttgctggcagacgccgatgccgtcaagaagggggatcaacagatcggtcaaaaccagctcgggttgctcccatttcaccaaggcgacgccttccatgccgtcgtgagccccgtaagcctcatagccgttgcggttcagcagctcggtcaaaagcttccgcgtcaccttgtcgtcgtcgatcaccacgatttttcgagccatgacgttccccgccggaggatcattttacataaacagagaaagatattccagtggacgccggcaggacgaaaacgcggggctcccttgacatattatattttcgttatataatatattcgttatgttaaagacgctgcgtacccccaagacggcgagagcgggatcggaggaagcctccgcccggatctttcgggccttggctcatcccgtccggattcgtcttctccgcctcctgctggaaggggactgctgcgtctcggaggccgaagcccgcctgaagatcagtcaacccaacgtgtcccagcacttgaagatcttgaaaaccgccggtcttatcgccggccggcgccgcggggcgaaaatctgctacgaggtgaccgatccccgcatcgaacgcattttgcgcgacttttcccctaaggagaatcttgatgaagaacgtccctgaaacgaacgaagcccgtttcgaggccgaggtgctcaaagccccccgccccgtcgtcgtcgatttctgggccccctggtgcggcccctgccggatgatggcccccgtcctcgaggagatcgccggaaagttcgacggggaggtcgattttcgcaagctcaacacggacgagaacgaatcgacggcccggacccacgggatcatggccattccgacgctgattgttttccgcgaaggccgcgaggccgagcggatcgtgggcctggccccggcctcggaaatcgaaagcaagatcaggagcgtcctcacccgctcctgatccccctcgccggccgcggccggcctggcccttgacgatttctaaaatctttctatattatttttgtaggatttacatcttttaaaccgggagtcgaggatgagccccaagggaaaggccgcgatcgccgtcctcagtcttctgctcggctggacggcctggaagggcgtccatttcgtctcgtcctcgccgcgggttcatatttccgttccggcggattcccgggaaagcgcgccgatgaagaaaatcgttcaaaagagccccgaggaatggaagaaagcgctgacgccggcccagtaccaggtgttgatcgcctgcggaaccgagccgccgttcagcgggatttacgacgacttctgggagtccggcggctatcattgcgccgcctgcggcgccctcctcttccgctccgaaaccaagtacgaacacggaaccggctggccgagcttcttcgaatcggcgtcgcccggcgccctggagcgccgcgaggaccgatcggccggaatgatccgcacggaaatccggtgcgccgcctgcggcggccacctcggtcacgtcttcgacgacggccctccccccaccggccgccattactgcgtcaactccgccgccctggccttccggccgtccgccgcggccccggcgggcgggcccgaaacggccacgttcgccgccggctgcttctggggcgtggaagagaagttcggccgcctgccgggcgtcctggaaacggtcgtcggctataccggaggccgcacgaaaaatcccacttatgaacaggtttgcacggacacgaccggccacgccgaggccgtccgggtgacctttgatccggcccgaatttcctacgccggccttgttcaggcgtttttctccttccatgacccgacccagctcaaccgccaggggccggacgtgggccgccagtatcgctcggcggtcttttatcacaccgaggaacagcggaaacaggctgaggaaatcaaggcggaaatcgaccggtccggccgccttcccggccgcctcgtcaccgagatcgttccggccggtccgttcacccgggccgaggaatatcaccagaagtacaacctgaaaaacaagcgcgcctgttccttctgatccgtccgggcgatcgccctccgctccgccgcggcgaaacggaactaaagacgaaatgcgagttgaatccaagggcgggttcggatacagtgaggctttcaggctcatggacgcctccggcccgatcgagatcaacgaccaattccggcaagcccttcactggatggaggagacggcccggcccgttttcgtcaccgggaaagccgggaccggaaaatccacccttctcgagcacttccgggaaacgacgctcaagaagatcgctgtcctcgccccgacgggcgtcgccgccctgaacgtccgcggccaaaccatccattcgttctgcggcttcaagccggacatcaccctggtcaaggttcgcaaaatcaacgcgaaaaaggatcccgagcgggcggccctgctccgaaagctcgacgccgtcgtcatcgacgaaatctcgatggtccgggccgatcttctcgattgcgtcgaaaaattcctccgcctgaacggtccgaagccccgccggccgttcggcggcctgcaattgatcctcatcggcgatctctaccagctgccgccggtcgtcgccggagtggaaaaaaccctcttcaccctccattacgaaacgccgtacttcttctccgcccactgtcttctgcgggattccttccgcctggaattcgtcgagctcgaaaaaatctatcgccagaccgacgccggcttcatcgccctgctcaacgccgtccgcaaccggtccgccgggccggaagacctggagaagctccactcccggtacgacccggagttcgtcccgcccgaggacgatttttatgtgaccttgacgagcaccaacgacctggccgccgcccgcaaccgggaaaagctcgccctcctgcccggccggctctatgcctatgaggcgatcgtcgagggggaattcgagcgctcctcgctcccgaccgacgaacacctcgaaatcaaggccggagcccaagtgatgctgctgaacaacgacgcggccggccgctgggtcaatggctcgatcggccgggtcgccggagtcctccgggagaagggccgggacgaccggatcgccgtcgatctccaggacggcaagcgggtggaagtcgcccccaacgaatgggacctctaccgcttcgcgtacgactcggaaaaggacgccgtcgtcagcgaggccgtcggggcgttcattcaatacccggtcaagctggcctgggcgatcaccatccacaagagccaaggcaagacgttccggaacgtcatcgtcgacgtcggccgggggacattcgcccacggccaggtttatgtcgccctcagccgctgcacgagcttcgagggactggtcctgaaaacgcccatcctccgctcgcacatccggaccgactggcgggtttcccggtttctaacccgctttcaatacgaccgggcggacgaacgccagccctacatagaaaagaaacggctcatcgaggaggccgtccgggacggccgcgacctcgagatcctctacctcaagccggatgacacgaaaagccgccgccggatccggccggaggccgtcgaggagatggaatacgggggcaaagccttcgagggcgtccgggcctattgccatgaacgcgaggacatgcggaccttccgcatcgaccggatgctggaagtccggatccgctgagcgtcggccggccctctaaacaggtaaattggcgttgtggctcccaattatgacgaggcgatcagcgtcccgctgtcgccgactttccacacgccccggatcgaaagatacaggaccgtccggacgatctcgcgctcgctttccgatttgtaccgaatatccacgagcatccagtcgtccagcccggggttgagcatttccagggtccgggggctcggcccggcgtattgccgccccttgaatccgctcaaggcccgcttgtcggacttgtgattccggatgaacaggggaagagcgccgcggttgaccgcgtccgccttgatgaacgcctcgacgtcgtctttcggaacgtaggattcgtccatcatcacccattcggcgccgcccgtccccttcccccccgtcgaggaggagcaggaaaacgcggcggtcaagagcgtcgccgcaaacaggaacaagacagccgaggaccatttgattccgcccatgccacctccttgaagcccgcccggcttacgtcggaagcgttccctgaacggccttccgcagctcgcggtcccgggcgattttccggatcgcttctttttggagcatccggtatctgtcgctggggacgggtttccgcttgatccgggccggcggaccggcggtcccggacgccgccccggcctcgatccgctcttctccttcccctccgggagccgtccccggccagcccgcaacggggtcctcgccggacgcccggccgaagaggtccttttcccgggaccccggatcgatccggacgaattcgtcgtattgggccgcggagaccaggctcatggtccggagggttcggagcatggccgaggccccgactccgaaatacctcttgaggtacagcacgtggtcgtaagccaggcgcgaggcacggaaatccttctcgatgatctccttgatcttgcccggcggcatcaggaaccgggcggcgaaggcttgggcgaacggctcccgcgggtggtagagagaggcgtattcatcgatgaagacgtcggggccgtcgatgaccggcccgtcgaaccggtccttcaggtagtggcaatattcatgagcggcgtggaacacctgccggccgggcgaaccgccgctgttgatcaaggcgaaggccgcttccttctgttccaagtagaggaagatgccgctcaccttggaatcctcgggcaaaggcatccggtagaggcggcagccgttggtctcgagcaaggcgaacacgtcccggatgggctcgtcccctaaacccaggcgccgccgctcctcatcggccatgcgttccggcgagaggccggagtagaaaggggccgtttctaggcgccggccggtgaggttttccagccggacgtaatcgtcgcagtagcgccggaaccgctggagctcggcccgcgtcttctcatcgacggcctcggcccggaagagcaaggcgaagggatccggcggagccggcttttcctggaagaaatacgacaaatcgcggttgaggaaaccggcgatcttttcgagggtggccatcgacggggtccgcttgcccgcctcgaggagggagatgtattcggacgacagtcccaccgctcgggcgaacgccccttggttgaggtgggcggcttccctcgctttccggattttgtgaggaaggatggcttgcatgaactccctcccttccgcaaccttaacacgcggttgcggaaattgcaaggcggccggaacaattgactcccggtttaaatccctccgattccccggccggcgatcgccttccacagcaagacatattcccgggcatgctcaggaaggcgttcgatttcttcggcggtcagcttgcgggccacgatcgcgggcgagccgaggatcaagctgccttccgggtatgtttttcggggagggatcaaggcccccgccccgacgatggaacggggggggatgaccgccttgtccaggatcacggcccccatgccgatgaggcaatgggatccgatggtgcaagcgtggagaatcgccccatggccgacggtgacatggtcgccgatcacggccggcagatcgaaatcgacatgaatcgtgctgttgtcctggatgttggttttttcgccgatgatgatgtctccgacgtcggcccgcaggacgcagttgtaccagacgctcgacccggccgccaggaccacccggccgaccaggcgggccccttcggcgatgaacgtatcgggatggatctccggcttccgggaggaaaaatcaaaatcagccatggcctcctccttttcgtttactatgccccaaggagagggacaaggcaaggaaaaatgatcgcgggaaaggaaaaaatcgaaagccagcgagagggatcgaacctccgacctgctgattacgaatcagccgctctaccgactgagctacgctggcactaagcggcgggagtgataaagtagccgaaacaggcgtttctgtcaatgaccgggaccggcccggcggcttcggcccgggaaatcgaggcttccgcgcccccgaaacgccgctccgggcgctctcgccgcggatttccgggcgagcgccgcttgcccccaaaaataaatcccgcgacgccgaaaagattccgctcccggagcacggcgaaaaagggaaaaaatgatcctgaacccgccccgattccttatgagccctctatttcgtctcgatctctttctggtgcttccgccaagcctcgtagccgaggtccaacagctccgatttcgaacatttttccgtttcctggagcctcaagccgacctcgattttttccccctgcgagcgggaccagatgacctcgccggtcatccggcagacccggttgtcttccggcgtctggatctgaaaccggaccttgtctccttcctgaaaggcgcgccccaggtcgaacacgaggcgcatcccttcccgggagacattgccgatcaacgcttcctccggcttggcgtcggggtcgcccgtctccacaagatccaccggaatcaggcactcgaaccggaaatatttcctcttgtcgtcttccatggtgatttcactttgacataatcccccctccattgcaagccggttttttgcttttcaatcggggatgatttggctacaatactgccctgaaagatcattcatgtacatcaagagactcgagctccaaggattcaagaccttccccgaccggacgaaaatccttttcaatccgggcatcacgatcatcatcggacccaacggaacgggcaaaagcaacatcgtcgaagccatccagtgggttctgggcggccagcgcgtccggaccgtccggggcgagaaaatcgacgacgccgtttttgccggcacggccctgcgtccgccgatggggatggccgacgtttccctggttctccaaaactccgaggatgagatcaccgtcaaccaccgcgtgttccgcaccggggagtcggaataccggctcgacgggaaaatcgtccgtctcaaggacatccaggacgagctctggaagcggaccatttcggaaaaccgctatttcgtgatcgaacaaggagccatcggcacgttcgtcacctccaagccggtcgaaaagcgggccctgatcgaggaggccgcgggaacggcctttttcaaggacaagaagcgccaggcggaaaacaagctcgaagactccgagcggaatctcgtccgcctggaagacatcatcgccgaagtctccaaggccaagaattccctggcccggcaggccggagcggccgagcggtaccggcgtctgcgcgagcgcgtccgggagctgaacgttctccacttccggttgaaaagcgcccagcttgccgccggccaggcggacatcctggcccgctatgaagaatcctccatccgcgagcgcgaacaacaggcccggctggcggacgaggagggggccgtcaaccaaaagcgcaagaatgtctgggagctggaacaggcgttcaccggaggccgggagaatctttatacgattcgatcccagatcgcccggctcgaggccgaacgggagcgcgatgccaagcggagcgaattcatcgaggagagccggcgaaaagcggcggccgacgccgacgaacggctcagggaattgctcgggctcgaggaagaaggcgcccggtcccgggaggagatacaggcgttgacggccgccctcgtcgtgaaaaaggaggcgatcgtctccttcgaacggaccctggcggaaacgacggctcggatctccccgctcctggagcagtccgaccggctccggtccgatcaccttcagaagctggccgaatggacggcggcccgcaacgacgcggctaaggtcgaaaaagagctcgagatgcttacccgccaggaggaaaagcttaaaacccggaaagaggaagcccgggccctggtcgaggccaaatccgaggatctgcggggcctcgaatcccggcggacggcctcgctcgaggaaagcggagctgtccgcggggaatggaccgccctccgcggccggctggccgaaaccgcggagaccgtcgctggcctagaacaccggctgcaagagctgcgcgccctgcgtgacgccgacatccaccatcttcaggccctcgaaaaaatcgccgtgaaggagcgcgcgtcggacgaaacgtcctccgtggacggcgccctcggcttgttggccgagctggtcgaaacggaagcggccgacgcggccttagtcgacgtcttctggaaagacgaatcgcgggccgcgatcatcgcgccggaggatcttcttcgcggactcgatggccggactttgaaagggcggtatctcctcttgggagggacggccggcgatccggacggcggggaatggcgggatcagccgggtgttctgggaacgctcaaatcccgcctccggccgggatcacgtctcccgggcggcctgcccgccctgcctgacgccgtcatcgtcgaggacgttcggaccgccgtccggctgtggctcgagcggcccggggcgaatttcatcactcggggcggcgacgtcctgtcggccgcgggcctcttgtctctcggtccccgccgggaggggctgttcggcctgcatcaggaaatccgcgacctcggccggacgctttcaatccgggaggcggaaatcgcccccgtcgccggagagctggaggagagggaaaacgaccggcgggagctcgagcggcggatcgaagaagcggccggccggctggccggattggaaaaagatctcatccagatcgacaaggattgcagcctggccgaagctgagcgaaccaagctcaaggaagacatcgccctcttcgcccacgagctcgagatcctggccatggacaaggccgccctcggggaaaagatgaagactcacgcggccctggtcgagcggctcctggaggaaaaaaacgctctccaagccgagggagaggaaagagaacgcgagctcgccgttcaccaggacaagcagaacgccgattcgaccggcttggccacggccaagggcgaagtccacgtcctcgaagccaagatcaaaagcctcgaggatctttgtctggccctggcccggcggaaagaggcctcccaaattaaaatcgatgagctgcaggcgggcgtccgctcctcgctcgaggaggccggacggatcaaaaccgccatggctgattccgccggaaaaatcaccggctttcaaacccggcaagaggaactggaaaaatccctggccgagggtgaaacccgcctgtcgacggcccggaaggatctcgaaaccgccgagggatctttgtccggccggcggatggagcatgaacggctcaaggacgaacgaatggcctgggaggtccgcaaggcggagatcgagcgcgacatggtcaacctcgaggaggcctgctggaccgagttgaaaaaaaacctccacgaaatccgttccgaaccgcttccggagcgggagccggggattccggagcccaccgccgccaaggtcgaagcggatctcgaaaacgcccgggaagacatggccaagtacaagaccgtcaacctgatggccgaggaggagtacgccgagcaaaagcagcgccacgactttctcatcgcccagcgcgacgacctccggacctcgatctcccagacgaaggaagcgatctcccagatcaacggcgaaagccgggaccgtttcctggccgccctgacggaaatcaataaaaacttccaggacctcttcatcaccctgttcaagggagggacggctgaggtccgcttgatcgacgaggccaatccgctcgaaagcggcgtcgaggtcatcgcccagccgcccggcaagaagctcgccaatatggggctcctctcgggcggagagaaatccctgacgagcctggcctttctgttcgccctgtttcggttcaagccgacgcccttctgcatcctcgatgagatcgacgcggccctggacgagcccaacctcgtccggtttctggacctgatgaaaaccatcaagtccgaaacccagttcatcatcatcacccacaactacaagaccatggaagtggccgattacatctacggaacgaccatggaggagcccaacgtcacgcgggtcttctccatgaagctcgacaagaagccggaggcggagaccgatgcctaaagtccagctctacgtgccgcccggcggatacttcgccgagcgctggtcgaaagggtcgtccatcccgccgctcggcctcctctcgatcggggccgtcctggaacgggaggggatcccggtggaaatcgtcccggccgacatcttggggctgagctggtcggacatcgtccgcaagatccgggcggaccggcccgacatcgtcggggtgacgatcacgaccgaaaaccggttccagagcttccgtctcgtccgcctggccaaaaaagcccgtccggaagtcctcaccatcctgggcgggccccatgcctcgatggccgccgaggattgcttggatcatatccccgagctcgacctggtctgccggggcgagggcgaggagacgatgctcgaggtctgccggcgctggacgccggggagcggagccgcggttttaggagatgtccggggcttggttctccgccgcgacggccgggcttcggccaatccgccgcgtccgccgatcgccgacctcgatacgctgccctctcccgctttccacttggttcccttcgagaaatacaacttcaccctcgatgtcccgggccggggccccctccgggcgatcagcgtcatgaccagccggggctgtcccttcgcctgctccttctgcgccacaccgatcaactggggacgccacgtccggatgcgcagtccggaaaacgtcgtccgtgaaatcgagctcctgaaggagcgctacggcatcgaggccgttttcttctatgacgacacgttcaacgccagcccccgccgggccgacgccatttgcgacttgatgatcgcccgcggactcgatgtccgcttcatgtgcgacgttcgtctcgacatcatgagccgggagctgatcgagaagatgaagcgggccgggctttactacctgtcctacgggctcgaggccggctcggaccgggtccggaaggacatcgtcggcaaacagatcgacctggccgacttccaccgcctcaccggctggtgcttggagctcgggatcgtggccaacgttttcatgatcttcagtcatccgaccgagacatggacggaagcccaagagacgatccgcctcattgaaaagtaccggggccggatcgagacttcgatcgccattctccatgtgtatccgggcacgcccctggaaaaaaccgcccgggagaggggcgttcttccgccgggattcacgtggacgaaacggtaccgcaagggggtcatcaccctccccctggcccagggcgacgttcccttgttcatcgacaagctccgctggtcccagatctgcgagctcgtcctgcgctggtcgctcagctcccggaaatcctctccgcttaaaaaagctccccgggcgctccgaaagatccgctcctggggggatttcgcccgtctcgcggtgatgggcgcgaaatacctccagctcaagtttttcgggttccggacgaagagtcgcgcataatatacgctccgccggccgccggccttttttcgccgggccgggggaatgacgcgggcgggcggagacggcttttcaaggaggcggcatgtcgctttatctctacatcatcctcgcctatctgctcgtcctcaccgggatgaatttctaccgggcccggaaaatcaagagccaggaggactaccaggtcgccggacggagcttgaaatggcaggtcatggttttcaccctgatctgcacctggatcggctcggggacgttcatcagcggggccgaattcgcggccaaggctggaatctcggccctctggctcgcggccggggcgtgggtcggcatcgtcctgatttattttttagccgcgaaaatccatcggttcggacagtacacgatcggcgatatcctcgaggtccgctacggcccggccgcccggctgttcggggccatcgccctcatcctttcgttcgtctcgatcgtctcctatcaattcgtcgccggcggattcatcttgaacgtcgcctccgacggaaagatttccgcgcccttggggacgctgatcgcggccgccttcgtcatcctcttcaccgcggtcggaggcatggtggccatcgcctacaccgacctgcccaacgggatcatcatcgtcctcgcctgcctggcggccgttcccttcgtctacgccgcctccggagggatcgaaaccgcccgccaagcccttccgccggggtatttcgccgcggtcaacagccagttcggagcccacccggtcctcaaggccgtcggctatttcctctcgaccctctttctcctgctcggcgttcagagcatgtaccagaagttctacagcgccaaatcggctcgggacgcccgcaaagccgtcatctggtggaccctgggaacgatcttcgtcgaatccgtcgtcgtgatcatcgccgtcttcgccttcagcaagctccagggacagatcgacctcagcgttcccaaggagggcgggaaggtcgtcttgatggccgcccggagcctggttcccgcccccgtcggcgtgcttctcctgggcgcggcctgcgccgtggtcatctcgacgggcatgaattacctcctgtcccaatcaacgaccatcatgcgcgacatctaccagcgctttgtgaaaaaggacgccgaggcccgccggatcatcgctctccaaaaaatcctggtcgtcgtcgtgggcattctggccttcctgatggccacccagctgcggagcatcctggagaccagcatgttcgcctacacgatctacggggcggccgtcacccccgccctcatcgccgccctggtctggaaacgggcgaccaaagccggggggctggcctcgatcatcggaggaacggtcgtctgcctcttcttcttcatcatgacccggatcctgccccccgaccgggtcccggacggagatccctggggcatccccctcatctacccggccttgatcgtctcgatcggcagcctgatcgtcgtgtccctcctgacgccccggccggagcccaagatcatcgagaagctcttcccgtccccatgagctcatgaccaccggcgttcttctcgatccccgtttcaacggccatttcatgggaccggggcacatcgagtgcccggagcggctcgaggcgatcgaggccctccttaaaacagagctggatttttccccggcccggatcgcggcccgcccggcctcggccgccgagctcgcccgcgtccacgctcccgagtacatcgatttcctctcccggacgcgggagcgggcccacacgccgctcgacgccgataccgcggcctcgtcgctgtcctacgaggccgccctcctggccgccggcggaaccatcgaagccgccgattttgtcctcgccgggccgggacggaacgccttcgctctcgtccgaccgcccggccatcacgccgagcgggggacggccaagggattttgcctgttcaacaacgtcgccgtggccgccgaacatctcatccgggaacggggcctccgccggatcctcatcgccgattgggacgttcaccacggcaacgggacccagaacgcgttctacgcccgcgacgacgtcctctttttttcgacccatcggtccccttttttccccggaggaggggggtgggacgaaatcggggcgggagacggaaggggatacaccgtcaacgcgcccctctcggcgggcaagaccgacggggattttctgttcctctaccggaatatcctcggcccgatcgcccgggcgttcatgccggagttcatcctcgtttcggccggcttcgatatttacgccggcgatccgctcggcgggatgagggtcagcctggagggcttcgccggcctggcctcggagctgatggacctggctcaggaaacctgcggcggccggctgcttcttgttctcgaggggggataccatatcgacggccaggcccgggccgtccgggaagtcctccgccggatggccgggacgcgggccgcgccggacattcgagccgatatctccatcaccacccagaaggaaatcactcccgtcgtcgacgtccagcgggcgttctggcctctttgagccgttcccgggcagggggagtcctcatccgaggacacgacgtctctttctcaggacgatccgggctccgaaaatccgctttttcaggcgggaacgcctggtacgtttcttgctataatgaggatgcaaggagaaatccgatgagaaaaacagcgctcgcggccgccgccgtcttattgttcttcacctgggcttcgggtcaggatgccgttccgccggactccgccggccgggaagcggccggcgggcggtactcctacgctcgcctgagctttgtcgacggccggattttccttcagcgggccgccgacctggcctccgaagaagcgacgatcaacaccccgatcagcgagggcgaccggctcggaaccgacgagggccgggcggagatctccttcggcgacatcaagtacgcccgcttggatcattacacgaaaatcgacgtccaaaccctcccccgggaccattcctccctgcttcgccttcgccactgggcggggaatctctatctcgatttaggttccttggaccgggaaaaggacgtcgagcttctcacgcccggggcgacgctttatttcctggaaaaaggcctctaccgggtcgacgtcgggaacgacggacggacggaaatcctcgtcttcgaggggctggtcgagaccgcggccgaggagggatccgtcctggtcaagacgggacaaggcctgtcgttggccgacggccgattcgaaggccggccgaagaatttcatgaccggcgccaccgacgccttcgaccgctggaacggcgaccgagcctccctcgtccgcgggacggcggaatctctcggacggctccccgtggaaatctccgaatacgaatcggagctggatgcttccggcgagtggatcgacattgaaccgttcggcttcgtctggattcccaccggcttgagccctggctggcgtccctatacatggggacgctggacctggctgccgttctccggatggtgctgggtgccgtacgagccgtgggggtggtgcaccttccattacggccgttggcaatgggatccgttttacggctggtattggatccctctccccggctggggagcggcttgggtcaactggtggtggaacgattattattgcggctgggctcccatgagctactgggggtatcccggcatcatctacaataacgattattacggccgcgggtgggacggcgactatccgcccgaatcacgggccctggtcgtcgtccggaagagccagctccgggaccccaacgcggggcaagcggccctgccgccgggggaaatccgctcggtcggccgcttccgcctgagcgaaacgccgccggacttcaagcccgatccgaatgcccctctccggcttgagcccctcgacaaacggggcgccgtcctcatccgcaaggacggcgggcagggcctgtccggcaacgttcccccggaaagcccccggctgattcggccggccgaccggccgtggaacgcgggttcggagaaagagctgaaaacgccggaggattcccgccccgtccggatcgccgagcggcccggaaccgcccccgactcctcacggccggccgaaccgcaggaacgccggatccgcaagacgtatccgtccttcgatcggttcgatcgaggggactccggaaaacgcgaatccctgaccgacctcctgcgggacaagttctaccgggttttccaaggcgaggagcggaaggcggattcgccgtcctcgaaatcgggatctgtttccggacgcagatcctccccccgctccagcgagggctcggcgtcccgctccagcggccggagctcctccccgtcccgctcgtcctctcccccgaaatcatcttcaggcaacagcagctcgggatcctcggggaacgtcaaaaagaaatagccggccggcgccggccgaagccgtcagcgctcttcccgggccacggacgtcccgccgtaatcgagcgtcgagatgtgatccagcatcgaacacagccgggtgggctcggttccttcgagaaacgcttccatgaaccgccatttgcactgcggggtggctagaagcccggtcttgcggtcgatggccatgaagtgaatgttcggcggggtctcgaattcttcgggataatactcgacggacgcatccttcgccttcgcctttatctcctcgaggacgcggccgaaaaaagtcatccagatcggaagggcggcgacggccccggtttcattccggccgagggaggtgttgtcgtccatgcccacccaaaccccgacacagagcgacggggagtagccgatgtaccaggcgtcggtgcagtcgtccgtcgtgccggttttaccgcctaaggccgtatcgttgagaaagacgctcgcggccgcagccgtgccgcgctgaacgacgccctccatcaggtgggtcatcagaaacgccgtctggggcgagacgacctcctcggcctcgacgacatgctcctccaggagattgccgtcccggtcctcgacccggctgacgaaaaacggccggatccggattcccttgttggggaagacgccgtaggccgagaccatttccacgagattgacctcgaacgtgcccaaggccagggagagataaggatacagtgttccggtcaagccgaagcgcttggcgtaatccacgccggtctggggggagatgttgtccaggatcttggccgtgatgacgttgcgagactcttccaagcccgtccggaaggtgatcattcccttgtatttccggtcgtaattgcggggcgtccaaaccgtcccggaccagggatcggggaagtccgtcggctcgtcgacgaggcggctggcggccgtgaaaccgcgctccagggcggccgtatagatgaacggcttcatcgccgatccggcctggcgggacgtctgggtcgctcggttgagctgcgtccggcggaaggatgagccgccgaccatcgccttgatctggcccgttcggggatcaatagccaccaaggccgcctgggcgagcggctcctgctccagggtcgccacggtttcttttttttccgcgtcccgggatttcacccggacctggatcacatccccgggcttgaggatggaatccagggccttgccgggggcggcccattccgccccctcattgatcaaacgggcgaaatcgtccttgaccttgatccggacttccttccggccgacggagaggacgatggcctcctcgatgtccccgggctcgaggcggggcgtgacccatgacctcagccggtactcctcgagcttcttcccggaggctttaaaggcctcatcggccaggagattcgccttgtcccggcgccagccgtgcctcttgtcataggcgcgcaaaccgttctggacggcttcgtcggcgaatttctgccaggcggcgttgagcgtcgtcgaaaccttcaggccgcccgagtaaagcgcctcttccccgtatttttcggcgatcgcccggcggacttcctcgaagaaatatgctccgaaatcataatcctcccgccccggcggaaggacggcgaccggcgttttccgcccgtcttcggcccgggcggcggtgatcatcccctcctccgccatccgggtcaagacatgattgcgccgttcgagggccagggccggatttcggtagggcgaataaagcgtcgggccgcggtacaagccggcgatcaaggccgcttcctcgaggatcaaatcgccgacggatttgccgaaataaagacgcgaagccgcctcgacccccgccgctcccggaccgagctcgaactggttgcagtacatttcgaaaatgcggtccttggagtatttcttttcgatctggatggagacgtaccattcggcgaacttgcgctggagggtttggagaggatggagaaacagcttgcgggcgacctgctgggtgatcgtgctcccgccgtgcagcttgcggcggcggaagacgttgagggcgttctccttgaccgagcggagaatcccccgaacgtccaccccgcggtgcttgaaaaaatgagggtcttcggtcgccaggatcgcgtcgcgcaggacggccggaatctgctcgtaggtgacgatcgtccgtttttccgcgccgatttcccgaacgacttgaccgtcgtcggccagaaccttggtggaaagggccggttcgtaggattcaaggccggagagatcgggaagcgtccggcggaccgcgacgaacgtcccgaaaaccgctccgaaaagcagggccgtgccgacaaacgccgtccagaggacgaccttccatgctcttttccggcggcttcccgcgcccgctttccgggggttcctccggaagatgattttgagtcctttccgcgccgcggccatgagtcgctattccccaaggacggccagggtccggtccaggatctcccgtcccaaatcacgcttgtcgcgttttccgtcgaggtggacgaaccgcgggccctggaacgtccggaagaggcggcggaccttccgcagataggattcgcgctcgaacagggcgtcccgcgtcccgcgcctcgatatccgggccagcccctcgggcgggcccacgtcgaggatgaaaacgaggtcgggcttgggagcgaagcgttcgttgacggtccggatccattccggatcgaggcccttggctccttgataggccatcgtcgaaaaatagtaccggtccaggaggacgacccggccgtccctcagggcggggcggatattccgggcgacattctcccggcggtccttgatgaaaagatcgagctcctcggccggcgtcagggatccggcttccttcgctttcgcccggagcgtccggccgaagcggcttcgggaaggctcccggaaagcggcgacgtcgcggccgcgggcccgaagcttgcgcttgagcattcggacttgggtggacttccccgccccatcgatgccctcgaagacgatcagccggccttttttcatcctcaggatgatagccggggaagcgcgaaaatgcaacggccggacggcgaatatcgttcaaaaaggaagatgattgttcgataaaagattatgaatattgaagttccgggagaatccggaaattgattcaagggaacgtttgtgctatcttaaaatttcttacaacagcggaatccaattccgatggaggatctctgatgacgaaaagaagcgcatggatagcggcggcggcgttcgtcctcggcgtcctggccgccgggtacgtcttcgtcttcctgcccgaaaagaaaacagaagcccggagcttcctgtccggcgacacgcgttcgctgggaacgaatttattcgccgagactcccccgatccggccggacctcgatttcgtcgccgtttcggagaagatcggccccaccgtcgtccgcatcgacgccgagcgtgtcgagccgggaatgacgggacgggtcacgcccttcgacgacttttgggatcgcttcttcggctcgccgggacagcggccccggagccagacgccccaggaatcgcgggccatcgtccagggaacgggattcttcatctcccccgacggatatatcctgaccaacaatcacatcgtcgaaaaagccaagaagatctcagtcttcaccgtcgccggggacgaatacgaggcgaatatcatcggaaccgacgttctcaccgacctcgccttgatcaaggtcgagggcaaggatcttcccttcgccgagctgggggattcgaccgccctgaaggtcggggaatgggttctggccgtcgggaaccccctcggaatggaacataccgtcacggccggcatcgtcagcgccaagggccgccaactggggctcggcgacagccgcacctatgaggatttcatccaaacggacgcggccatcaaccggggcaactccggcggcccgctcgtcaacctcaagggcctggtcgtcggcatcaacagcaatattctcactccttcgggcggcaacatcggcattggattcgccatccccgcctccatggccaagaaagtcgtcatccagctgaaggacaagggccgggtcgtccggggcaggctgggcgtttccatcgccatccgcccgatcgatcaggatacccagaaggccttgaacctcaaggatcgcaagggggcggtcatcaacgacgtcgaggacggcacgccggccgaaaaagccggcctcaagcggtatgacgtcatcatcggcgtcaacggccagccgatcgaaaacagcaacgatctgcggttcaagatctcggagattccgccgggcagcccggtcgaaatccggttcatccgagatggaaaagagatgaccgtgaccacgaaggtcatcgagctcgcgcccgaggaaaagtcccggccggcggccggggccgcgcccaagaacatcgggctgtcggtggaagccctgacgccgcccctggcccgccgctacggtctcaagaccgatcgcggactcctcgtcaccgacgtcgctcccggcggtccagccgaccgccgcggcctcgctccaggcgacatcatcatcgaggccaaccggaagaaaatcgaaacgctcgaccagtggaacgccatgatcaagcctctcaaaccgggcgatcccctcatgctggccgtccggagggaggacgacagcggtcaattctcagaattcatcgtcaccctgcgcatcaccgattaaccatgaaattcaccaagttccacgccctgggaaacgatttcctgatcgtcgaccaggacgaagtcgcgctgttcgaagagccgggggacctggctcatcgcctctgcgagcggcacaccggcgtcggggccgacgggattctcctcgtctcggtcacgaaccggtcccggggcgaggcccggttccggattttcaacgccgacggatccgaggcggaaatctccggcaacggtctccggtgcgccgccgcttatctctattcccaacagaagatcgacgtccccatcgtccgcttccagacggccgccggagaacggacctgcgccctcgtccgccggaccaaggacgggtttctcatgaagatcgagctggggattccgcggttcgccccggccgatatccccttcgacgacggaacggtccacgaccggatcctcgattatcctctcgtgatcaacaccgaaacctacccggtcacggccgtgtctctcgggaatccgcactgcgatgtcttcatcgaccgcttcccgggccggttcgagtggcatgagctcggccgggaaatcgaatcgcatccctttttcccccggcggacgaacatcgagttcatccgggtccggggacgggacgagatcgaggtcgtcttctgggagcgcggcgtcggggaaacgctgtcttccggcagcggggcggccgcggcggccgtggccgcgatcgtcacgggacgcacggaccggacggtcaccgtccggacggagatgggctccctcctcgtcgagtggccttccgagacggccccggtcgttcagaccgggccggccgaattcgccttcgtcgggtcgtttctcttcaagtaggccggcccgttttccggacgagggcggcctccaggacctggcggatgtcctcgacgaagatgaactccatctccttcttgaccaccttgggaatgtcgatcaaatccttccggttgggcgacggaaggatcatccgcttcacgccggcccgctgggcggccaagactttctctttgactcccccgacgggcaggacgttgccctggagggtgatctcgcccgacatggccgtgtcccagcggacggcgcggtttgtgcacaaggaaatgagggcggcggcgatggtgatgccggccgacgggccgtccttgggaatcgccccctccgggatatggacgtggaaatcgttcgtcccgaaaatccggttgtcgattttcagctccttggtgtggacgcgggcatagctgagggccgcctgggccgattccttcatgacgtcgcccagcaggcccgtcagcatcaggccgcccttgcctttcatcttcagggcctcgacgaacaggacttccccgcccgtctccgtccaggcgacgcccgtggccacgcccacccggtcgctcttgcgaagctcatccttgaagatcttcggcggtcccaggtaggactcgacgctttgggacgtgatcttgttgagcgtctttttattctcggcgaccttccgggcgaccttgcggcagatcgaggcgatttcccgctccaggttgcgcacgcccgcctcccgggtgtagcgggagatgatcgtccggatcgccccgggcgtcacctggatgtatttatccgagagggcgttctccttgatctgcttggggaccaggtgccgggcggcgatctccatcttttcctcctcggtgtagccggggagctggatgatctccatccggtcgcggaaggcgggctggatgggatccagaaggttggccgtcgtgatgaacatcacccgggacaggtcgaacggcacggccaggtagtgatcgcggaacgtgttgttttgctccggatccaagacctcgaggagcgccgaggagggatcgccccggtaatcggccccgatcttgtcgacctcgtccatcatgaacacgggattgttcgatccggccctccggaggccctggatgattcggccgggcagggctccgacgtatgtccgccggtggccgcggatctcggcttcatcccgcactccgcccagggaaatgcgaaggaattcccggccgagggcccgggcgatggacttgccgagggacgtcttgccgacgcccggcggtccgacaaagcacaggatcggccccttgattcgccgggacagcttccggacggctaaatactcgatgattcgttccttgaccttatccagaccgtagtgatcctcgtcgaggatggctttggccttcttcaagtcaagattatcgatggtgctcttgctccaaggaagggcgaacatccaatccaggtaattccggacgaccgtcgtctcggccgactcgggatgcatctgggacagccggctgatattcttctcgatttccccccggacttcttccgtcaccttgagctttttcagcttttcctgaaagctccggatttcttcctgcagctcgttgccctcgcccagctccttctggatggccttcatctgctggcggaggaaatactggcgctgatgcttgtccatttcgcccttggcctcggtcgagatccgcgactggacgtcgaggatctcgatctccttggtcaagtcatcgtggacctttttgaggcgggcgatcggatcgacgatctcgaggatcgactgggcctcggggaccttgagctcgaggttggccccggtcaggtcagccagccggccgggttcctccacattcgaggcgatgatcaaaacctccggcggaatgcttttgccgagcgaggcggctttttccagccccgaccggacgttgcggacgagggcttccccttccagcgatttttcctggtcctccggctccgggatcggctcgatttcggcgatgaaatggccgttctcctcgtcgtaggtccggaccgcggcccgggtcaatccctgggccaggatgcggatccggccgtcggggagcttcagcatccgcatgatcagggcgaccgtccccatttggtaaacttcgtcctgcttgggatcttcggtatccacatccctctgggtcaggagaaggatcatccggtgggaagcgagagcctcgtcgatagccgccttggatttttcccggccgacgaacagcgggacgatcatgtaagggaaaacgacgatgtcccgcagcagaaggatcggcagcttgaccggtatggacggtttggaatcctggccgtcggcgaggccgtcgaccggatccgattggggatctttttcagccattccattcactccacgtttctcttgatgcggacaaggcgtcgccgccgcggcgtttcgatccgcttgggaagggcgatcgtcaaaacaccgttttcgagagtcgcccgggcccgatcggggacgaccgaccggggaagggccagcgtccgccggaacggcccgtattcgcgctccaagcggaaataccgcgtccccgcgggaacggctgcttccttcttccgtcccttgatctccagccggttcgtctgcagggagatctggaggtcctcggtccgcaagcccgagacctcgacggccacgatcagcgtcttttccgtctcgatcagatcgagacgcggcatccagcccccctgccaatccgccggatagacgccgcccccgctcgtccggatccggatgaccggatgaaggcgcttgatcatgcgacgttcatagatacgtccgcggcgggcgtttgtcaaatcggcggggcgggcttcctatttttcccgcagaaggctctccagctcctgcttgaactccagaacgtcccggaattcgcgataaaccgaggcaaaccggacgtaagccaccttgtccaggtccttaagcctggccatgaccatctcgccgatttcggaggccttcatctccttctccgggcgctcttggagcttggactcgacctcctcgacgatttcctcgaacttggacacggggatgggccgtttttcacaagccttgaggaggccgcgcaacagcttctgccggtcgaagagctgccgcgagccgtccttcttgacgatcatgtaggggatttcctcgatcttctcgtaggtcgtgaaccggcggccgcaggcgatgcactcgcgccttcgccggatggaaatcccctttttgctctcccgcgaatcgatgaccttgctttcctcgtggccgcaaaacggacatttcatggggtcttcgcctttccgagccgcttgatctgaatcagggtcagcccgtcgatccagaggaaaatcaatccaaccaggcagctgacgatgtattggaccgcgtgaaagacaacggtcaggcctccggcttcatttgcgttcatcccgaagagctcgatcatgccctgcttgctgaaggcgtgatatccccccaccatccccggggtcgggatcgcggccccgactccggtcaggaaaacataagggaagagaaaaaagaaacggatccggatgtcgaaggccagaaaaaagacccagtagaagaaaacgatccccagccaaacgacgaaggacaggccgatataggccagcaaggtcttgagggactggaagaatttcaacccgtcgatgaactcgtgcaggagctcgaggaccttcgaccggaagcgctccggaatgatccgggcccggagaaccgcccctgtcacggcgagggccttgtcacggaagaagatgaatcccaaggaaacggccaggagcaccgtcgccgccccggccccgatgaggccgagcacggttagattcttgatggattcggtctgaatcctgaaaatcgtgatatacaggggccgggcaagaagaaaaaggcccaggagggcgcacatggtgaagacatcgaagatccgctcgacgacgcatgtcccgatggcgaacccggagcggcatttctcctggcgggcgaggtaaaggggcttgaccagctctccgatccgtccggggaaaagatagctgacggtgaagccgacggcgttggccgcggccaggttgtacagccgaacgtcctttttttcgtggaccatcagaatcttccaccgccaggcccgggtgaggatgtggatctggctgaggggaataaccaagagaaacatcccccagcggacgtgttccttgaggtatcggaaggcctcgctccagtccacgccccgcaagaagacataaagcaggacgccggtcaggccgaggacgaaaaagaggcggaaccactgtttccggatcatgatgcggagggcatattatcacaacccccccgccgcccggaagggcttgaaaagaggaggaaaatccgctatattcaaccccttccggttgggaagtcgtccaacggcaggacccatgactctggatcatggtatctaggttcgaatcctagcttcccagccatcctcttttcccctccccggtcttcttccgcggattttcaagggattatttatcttcccgtcccctgactgcggacccgtggaagaagccgaagcgcagccggcgttttccccggatcaggcgaacggcagggacgggcttttgacctcgacgccgtcccagcaataggtgcacagccggtctttgggcagcccgatcgcccaaatcaagtcctccaggcgttgaaaccgcagggaggtgaggttgagacggcggcggatgcgctccaccatggcctcgtattggggcgaccgctcgtcggcgtaaagcgaaaggtccaccggcttctctccctcgatttcccggatcgcccgccgggcggccaggtccatctccgaacgggagacggaaaaattgaggaatttgcagccgtggatgagcggggggcaggccggccgcatgtggatttccatggcccccgtgtcgtaaaggcgctggacggtgtccttcagctgggttccccggacgatggagtcctcgcagaagaggaacctcttcccctggatgagttccttgatcgggatcagcttcatccgggcgaccaggtcgcggacgtcctggttctgaggcatgaagctccgggcccacgtcggcgtgtacttgacgaaggggcgcttgaaaggaatgccggccgcggccgcgtagccgatgccgtggccgacgcccgagtcggggatccccgcggcgaaatcgacggcggccgggtggcggcgggcaagggcttccccgcagcggttgcgggccgcctcgacgttgatcccttcatatgtggacgccggaaagccgtaatacacccagagaaaagcgcagatctggaggaggccgccgggcttctgccgggtttccgccccttcgggcgttataaaaacgatctctccgggtccgagctcgcggaccgtctcgaaaccgaggttcgggaaagcgcacgtttccagggtcacggcccaagccccgggcttggcgccgagaatgaccggcgtccgcccgtatttatcccggccggcgtagatgcccttttccgtcaggacaagaaccgagcacgagccctcgatcgagtcctggaggttgcggattccggcttcgaacgaatcctcctggttgatcagcgcggccgccagttccgtcggattgacccccccgcccatggattcggcgaagtgaatgcgccgctcgcggaaaacccggcggacgagcgcgtccatgtttttgatcgcggccacggtgacgacggcgaatcgtcccagatgggaatgaatcacgatcggctgattgtcggaatcgctgatgacgccgatgccgaggttcgccgtcaagccgccgagatcgggatcgaacttcgcccggaactgggtgttttcgatgttgtggatcgacttgaccaagccctcgggccggacgacggcgagcccgccccgcttcgttccgaggtgggaatggtaatcggtcccgtaaaacaggtcggaaatgttctcggcccggctcgcgactccaaaaaatccgcccatggggcctccttgaatcaccccgcctcattcgcgaaaacgtcctctgaatcggccgaggcgacatccgctcttcccgtgaattcctcccggcgcccggctcgtgaattaggcgggataagtcctcattctagtccgattggagccgctgtcaaggcgaagcgaatcccggggacgcgcccctggattcttcctttgttcggcctcccggtgaccgtttcgaagcttcgacagccggcgggagccggccccgacggaaacggatcctgcggcggcggaagcccctggcgagcggcttggttctcaagggaggggggatcgagattcctcgaacgcccggacgagagcttgatggtcatcccccccgatcgccccgacggttctcaaggtatcggcgatccaccggcccttgaaccgcatccagcggtcgtttttccgcggatcggaccgcagcggccgcgggatgacggccgtcaaccggaccatttcctcgagagtcaaggcggcgacgtcctttccaaaccagtgccgggccgcggccgccgctccgaaaatccccggcccccactcgatgacgttcaaatagaggtgaaagatccggttcttgggcagcgtcctctccaagcgttgggcgatcaggaattcccggagctttcggaccggggacttggccggggacaagtagagattcttagccagctgctgggtgatcgtgctcccgccgcggacgaagcggccttccttgaggtccttcttgaaagaggctttgagctcggcgaaatcaacgccctgatggtcgtaaaacgacgcgtcctcgctgacgaggacgctttttttcaggagcgggggaatccggtcgaaggcgatccaatggatccggacgacgagggttttcccttgggcccgggcgtcggccttccggcgctcgatgagggcggtcgacttggggttctccgtcttcagatccgccacgtccggcagggtcagccaaaccatcccggcgaaaacgatcagcaaggccgcgcccgcggcggccgccttaccgaagacatgcttttttttcggccggggagagccgttttccgttccgctcatgggctgaaccgcgtccggggatattatacgcccgactcccggggagaaaccagcggccgggtagacggccgtcgattcctcccgtgtcctggccgtccctccggatcatccgccggggggggcgggagcttttccttgcgccttctccctcaaaaaggcccgcgcggccaggcgttttttcggtccgcccgcccccttctcataagagacggcaacctgaatcctttttcctgcgtagtggaagaaggagttgtcattcatgggcgtcaagatcatccggaggatttcgagcgaggcggatccgcgcggcggacgtcgcgcggatctcctcgtttttgacgccggcttcgcggccggatgatgagaactccttcccgcgatctttcagcctcggtcaaggagaaaatattgtgaaaagaacgttcctgatcatcggctttctgatttttttattcgcctgtctttgggccggagcttttccgtcggccgcagcggaacaagagactccggagacctccgggctccaagagcttcgtctccgcgtttcgttcaccgcggaggtgagcccgtcgcccgtgtccgggcggaatatcatcgggtttcaccgggacccttcagcccccatcgataatcccgacctcctcgaccctcagccgactttcgcctgggatgtccgcggatggaaacccggcgaagccatcatcctcgaaggccgggacgccgtctgctggcacggcgacctctccgccctggacggctggtacggcgtccaagcgtccctcaaggccaaccgcatggcccggacgcttcaggccccgggcaacgcccggagcgtcaagaacgtcgttttcatcgagaaagggaggatgagccggccgctcgacctgctgattcacgttcccgccggcccggcgccggaattcaaggaaagcgaattcatcaaggaggcgaacgttcccagcccgcggctgacccggttctacgggaaagcgcaatcgatccgggcggccgtcatcctgccgccgggctatttccagaatccggagcggcgctatccctcggtctacgtcatgggcggatggggatcgagtcccctggacgccctgggcggagccccgcaaaaacgctacggcataaaaacgctcggagggcgcggatgaggaggcggaatttaaaagcgggcgaggaaagagaaaaagtagcgctacggggattcgaaccccggtttgatggctgagaaccatccgtcctaacccctagacgatagcgccgtggagtagagaagatagcaaaaaggggggggcgggtcaaccgaaaacggacggtttcgggcggaaacgcccggctttcgccccggccgggcgcccccgggacccaaaagccgaggtgcggatcacctcttgtcccgcggaaacgcgctccgcatccccgccgcctccgtccgagaccgggtctcccccgcggcgctcctttcagtcctttccctttcttacttcctcgcttcccgaacgacgaaaaccgggcagggcgagtggcggatcacccgttcggcgaccgagcccatgaccaagtgatgccaaccgccgtggccgtggctggagatcacgataaggtcggctttcgtctcctcggcccgcttcacgatctccttgccggcgctgccgtgtccgacgaccggaacggccttgatcccctcgggaatcttttccttgacgagagcggccaggcgggtttcggcgtcccggtgaagaagaatttcgtactcggggacctggaaggagaactgggggtcgatcggctggggaggtaaaatcggcaggacatagatgacctcgatgtccgcctcgaacaaccgggccagctccgcggaatacgacaggcccaaaagcgacggctcgctgaaatccaccgggcaaaggattttcttgatggccagcatcggcgcctcctcccccctccccccttttccttgacgttttcatcgtagcagacggaattcgcctctgtcaaaggatcgaatcgcgccgtaaatcattttcccctcttctctttacccaaggaggccggaggcgagacgaggctcttttggatggggttgacagcggcttgacgggaggcggcgtcccatcccctcccgctgaaacggttaccctcttttctcctggatgctttttttatctcgttccccaggccgggataaggctcgggatgggaggaccgtccccgccgcccccggtcgcccagggacaaggatctggatccgagtgcaaagaaaacgaggcgggatgctcggggacgcctttgaaagactccgacgccgatcaaactattgacacctgcataagtaatgtcctattttaaacgcaaaaaaaggggcgtgtgcttcaggaatgagcggagcagagattgtttcctttgaagggctaggccgtgtcgccgaaccgagttcgtcaagagctcgtgttcgaagatcgcctcgttcgccatcgaattggttttcaggtaacaccagacgttctcggtgggattcaactccggcgcataggccggcagaaactccaagcgccagtcctttttgagagcaatatagcgctgaacacaccgagcccgatgcggcatgaaccgatcccaaagtagcgaaaggggacattcaaaatgccggctcaaatccttcaagaacgaaaggaccttgccggcgttgatgttttcctgaggatgaagccggaaaaacagctggacgcggtcccgggcgggagagacggccagggccgcgatgaccgaaaccttccgataactgtttgttcgatgtcggaacaatggcggctgaccgcgaggcgcccatgtcctccgcaccaaaggcatcatcagaaagccgctctcgtcgatgaaaacgagagaagcccctacgcgagcggagttttttttacccgaggccaatcgatcttgacccaggtctggatggctgcctcatcccgctcaacggcacggcgttgcggcttctgggggctccagcccagagcgtgcaaaattcgtccgatatggtcgacatgataacggacgccgaaggctttttcgatgacctgaacgactcgggggcaggtccacaggtctgtcacaaagcccgatcggccggcccctcgaagcaggatcgcctccagcttccgctttttctgccaatcgagccgcggagggcggccggggagtggcttggaacgaatggcttcaggcccgtccttcaagatactcgccttccagcgtcggacgctacggcggtcgacaccgattttacgagcaatctccacaggctgaagcccttgtctcaaataatccaaggcccggtgtcgtctcgcttccaggaactctgcgcttccggatggtctcatcgcttcccttcggatcagagtataggacatttaatatacaggagtcaatagtcaatgttcttggatagggacaaggcccctttcgccgtttcggcccgaaaaaaagggaggcgcgtcggacgggatgggaggcgttcgatttctccggaccgtctttctcattccttcggtttgtcttgatcattaagatcttgaaattatataatttcttctcttttttataagatcgccatgaggcgtgttcccccttcgcgacgaagccgagccgtccgatggattcgtgaataaggccggccgcgggaacaggtcgtcgcctcccggagaatcatgagatttcaagccgtcattttcgatctggacgggacgctcctcgacacgatcgaggatttaaccgattcgatgaacgccgccctcgcccggctgggtttcccggcgaaaaccgtggaggaatgcaaaatcctggtcggcgacggcctggcgacgctcatccgccgggccctgccttcctcccgggccgaggatcccgaggccttccggaagctctacgacggcatgcgggccgaataccgcctccgcaacgccgtcaaaacccggccgtatcccggcatcccggagcttctcgcggcgttggccgaacggaaaatcccgctggccgttctctccaacaagccccacgattcgacccgggaagtcgtggaaaggaatttcccgggcgttcccttccgcttcgtctgcggcgcccgcgaggagattccggtcaagcccgatccggccggagccctggatatcgcccggcgtttccatattccgcccggggagatcctgtacgtcggagacacgaacaccgacatgcgcacggccgccgcggcgaagatgttcgccgtcggcgtgctctggggattccggacggccgacgagctccggaagaacggggctcaagtccttgtctcccggccgtcggaaattctcgggcttctcgactgagagggatcgacccaaggaaccgcccccgccggccgcggcggacggcttatttcggaaaccgggagatcgcgcccggaaggccgggcgaaccgtcgttgataacccgattagaccggatcggttccggccggcggagcggcgtcctcgctccggccgcggcggaggagccgccgggcgaaatcgcgggcctcgcccagtccgagaatccggcaaaccgcgtaaaagatccccaatccggccatcccgcagacagcgacggccccgagcccgctccagaacgacgttccggcgatccgggcggcggccgccgccccggcccaggccgccccgccgcccgcggccgaggccaggacgagccggaccgcgaacccggccagcggaccggccggcaaagagccgatctttctcgggagaagggcgaggagaatcgcgaagttgacaaccgccgcgatggaggccgaaaggggaaacgcccggtgtcccaagacgcccatgagcgccaggttgaaagcgatattggtcccgaccgagatgaagctggcgatcatcgggagccgggcgtcccggcaggcgtaaaaaaccgaagtgaggttgcggagggcggagacgaacggcgcgccgatcaggtacagaaccagcataacggccgtggcccgcgtgtcggccgcggtgaagaggccgtgctggtagatcacggcgatgatggggcgggccaggacggcgatcaagaccgacgtcggcaccgtcaggaacaaaacgaggcggagggaatcgtccagcgtccggcggagatcgtcgaaccgcctctcgttgaccagccgggaaaagagcggcagggacacctgcccgaccgacacgcccagcatccccagcggcaggtgaaaaacgcggtaagcgtaattcaaccagctgatgccccccgggatgaccgagatcagcatggtgttgacgaggacgttgatccgggaggccgagaggccgatggccaccgggacgaaaagcgccatcgccttgcggaaggccgcgtcccggaaattgagatggagccggtaggcgtaaccccggcgggaaagcgaggggacctggacgaggaattggacgaatccgccggccgtgacgccgaaggccatgcccaggatcggatcctctccgcgattcacgaaccagccgaaaagaacgaccgggacgatgatcgaaaagaggttgaagaacgccggagcgacggccgggatgaaaaactcgttctccgtgttgagatagctcatcgcccaagcggccagaacgatgaacaggagaaacggaaacatgaggaacgtcaagcgggccgtgagggccgtctttccagggatcgcgccgaagccgagaccgacgacgcgggccagcgccggcgagaaaatcatccccaggacgacgatcaggccgaccgtcaggagaagagtgttgaggatgttggaggcaaagcggttctcctcctcccggcccttggcccgggcggcggtcaggaccgggacgaacgcgttggacatcgcgttttcggcgaacaggtcgcggaaaagattggggattcggaacgcggcgttgaaggcgtccgaagccgccccgacgccgaagagaaaggcgaagacctgttcgcggacaaggccgaggatgcggctgagtccggtgccgacggcgaacgagcggacgcccctggcgatatcggccataagatcgtgagagcctttctgaaccgcttatagcacaggcgccggggggagtcaaaaagggctataatgtccgtcaaggaggcgcgccatgaccattccgcccgctccggcctttaaaaaccgtttgaaaaaaggggatctcttgaccggaatcctcctctcgcttccctctccggaaatcgccgagacctgcgcttcggccggtttcgactggctctttctcgacatggaacacgggctgctgggttttcccgacgtccagcggatggtccaggccgtctccggccgctccgcctgcctcgtccgcgtcgcggtcaacgacccggcctggatcgccaaggcgctcgacacgggggccgacggattgattttcccccacctcaaccaagcggccgaggcccgggcggccgtcaaggccgcccgctacgctccccagggaagccggagcatcggcctcggccgggcccagggctacggagcgcgggtcgcccaagccctgaacgaagccaacgataaaatcgtccttgtcgcccaagccgagcatatcgaggcggccgaaaacatctccgacatcctctcggtcgaggggctcgacgccgtcttcgtcgggccgttcgacctctcggccagcctgggcgtcccgggccgaacggacgcccccctcgtccgcggggcgattgcccggatccgcgaggcctgcgccggccgaggcctcccctccggaatcttcagccccgacgccgccgcggcccgggcggcggccgccgaaggattcaccctgctgtgcgtctccaccgacacgttgctcctcgatcacgcggcctggaatctcctccgcgaagtccgggccgaagctcggtccgcggatcgataaagagtgcggacggaccgccggaccgcggcttcgcttctcccggtaaaccggttataatcggaaagagagaatcttcatggaagtcatcatcaaacccgacagccacgccgcctcccgtttagccgcccggaaaatctccgccttggtccgggcgaagccggacgccgtcctcggactggcgaccggccaaacgccgctcgaaacgtacgaccggctgtcggagcttcaccggacggaaggcctcgacttcagccgggtgacgacgttcaacctcgatgaatacctcggcctggagccctcccacccggcgtcctttcacgcctgcatgcggacgagcctgttttccaaaatcaacatcgatccggcccgggttttcctccccgacggaatgtccgaagacattccccggacctgccgggaatacgaggaacgcctccgggcggccggcggcatcgacctccagctgttgggcatcggctccgacggccacctcggcttcaacgagccgtcctcgtcgttgtcctcccggacgcggatcaaaaccttgaccgaccggacgcgcaaggacaacgccgccgccttcggcggggaggacaacgttccccaccacgtcatcaccatgggcttgggcaccatcatggacgcccggacctgtctcctcctggcgttcggtcggaagaaagcggccgcgatcgcccaggccgtggaaggcccggtctcggccatggttccggcctcgattcttcagatgcatccccgggcgatcgtcatcctggatgaagaagcggcttccggcctcaagcggacggagtattaccgctgggtttacgatcacaagccgtcttggcagaaggactgacggccggcccggacgctttttccaaaagatccaggtacgcgccggagactaggtcggccggccggattttcaattttttcatcaaggcgcgggcgacggccgctccgtcggcggccgcctggccccggcggaggacgacctccagctcggcgaacaagcccaatccggagacggcatccaagtggatgcgcgtttggccggcccgggcggccagccggattttccggaccacgccgcggacgccgaaggccgccgccaggacggcccggagcccggccggatcggaggtccgggcgatctcgaagctcgagagcttcggcccggccgcgtccggacgctcgtagtaaatcaattccccggtccgggggccgaggatccggagcttgaggcggcccttcgggatcttgaaaaagacgtcctcctggacgaggacgcgcggcttcgacggccggagcgccttgagccgggcggcgaacgcgtcgagatcccggacccgggccttgatttcgacgttgttcatcgcggctcgctctccgtccggacgcggtggaggccgagcgaggcgagagccggagcggcccgggactgttcgatgacgagacggaggcggcgggcggaaaccgccgggaagcgcaggatcctcatggctccgacggtcgttccccgggccacgggccgccaggcgttcccctccccggcttccaggacgtacgattcgatccgctggccggaccggatatgctcccgaagaacgaaacggtcgaactccgaaggacccggaagatcgatcgtgatttccgcccgtccgccctctccgggcggcgtccagaaggtgttcaaatcgtcgtccaacatcgtctccgggccgtgcccggtggcggacgcggacgcccggacggcggccccggcggcgaggttggtcccgtacgccgcgtcgagggagcggcgcagctcccggagggcctcttcgtcgttctcgtggatgaggccgcggcggtcgggcgggacgttgaggaggaggacgccgtttcggccgaccgagctttcgtagatatcgaggagcttctcgggtgatttgacgtccccgtcctgggaggcgtgatagaaccagccgggccggatggagacgtcggtttcggccggataccaggccaagacccgggccccggccagcttttcccggctcccgagatcggccgccgtcaggtcgcgggggacgaaaacgtcgtccaggggaaagagaccggaggcggcggcgagcgattccggattccggacgtcgaccgggatggcgctccactccgtttcccgcccgtagccggattcggtcccgacccagcgggcgtcgggggccatcatcgcgatgacggcctccggctggagctcgcggatcgtccggtaatacgcgggccagtcatagatttgattcttccgctccgggccgtctcctggcgcgccgtcgaaccagacctcggcgatggggccgtagccggtcagaagctcccgcagctgggccaggaaaaaagcgttgtagcggggcgaatcgccgtaggagggctcatggcggtcccagggggacaagtagaatccgaagccgaggccggcctcccggcaggccgcggcgacttcgcccacgacgtcgccccgccccccgcgccagggactgctcttcacgccgtgggcggtttcagccgtaggccagaggcagaatccgtcgtggtgcttggccgtgaggatcagcgttttcattccggcctgcttgaagacccggacccattggcgggcatcgaagtccgcgggattgaacaaggccggatcctccgtcccgtcgccccattcccggcccgtgaaggtgttgatcccgaaatggatgaagcccatgaactcgcgggcctgccaagcccattggcggggcgagggaacgacggcggcggctttgcggatgatggaatcgatggattcacccggctcgatcagggcgtagttacgggccgcggcggacgagaatgaggaggatgacgagagcgaggaggacgacggcggcggcgcctcccgccgccggttcacgcaggaggatggaaataggaaagccgcggcggcgagcaggaaataggcggccgtttttccggacttcacggcccgatgatatcacaaacaaatcggtacctgtttaaccatttccacatttccccgcccggccgatccgaacctcaatccgaacctggttatccatttccggatttcctcctgatcccgcctcgcctgatcttcccggcctttcgtcttccggccctcccgcccgccgccgagggagcaaattaggcgatgggccaaagcgccggcaggccgctccttttcacgggcccgacttgccgactttcggatggaaaagaaccaaaaaatcaggaaatggttaaacaggtaccgatttgaaacaggtaccgattgatcgggcatcgggaagggcgccgaccccgcgccggattgggtcccggccgggcggccggccgtttcttgtctctccgggaaacccgggctataatgaaaaaaggcattcaccgggaaggaggatcccatgaaacaaacggaaatcatcattctcgccgcggcgatcatcgtctttttctttctcatcggcatccgcatcgtccgcccgacccaccgggggctggtcgagcgcctgggaagatataagcggttcgccaatccgggattcaactggatcattccggtgatcgaccgtctctaccaggtcaacgtgaccgaggtgatggtggacgcccagccccaggagatcatcaccaacgacaatctcaacgcccgggtcgacgcccaagtgtacttcaaggtgaaaaacgacgagcagagcgtcaaaaacagccagtacaacgtcaacaattaccagtggcagatcgtcaacctggcccggaccaccctccgcaacatcatcggcaccttgaccctcaagtcggccaacagcgaacggggcaagatcaactccgagctccagaaaaccctccgcgaggaaaccggcagctgggggatcgagatcgttcggaccgagctcaaggaaatcgacccgcccaaggacgtccaagaaacgatgaacaaggtcgtcaaggccgagaacgagaagatcgcggccgtcgacttcgccaccgcgaccgaaaccatggccgacggcgcccgccgggccgaaatcaagagagccgacggcgtcaagcaggcccggattctcgcggccgagggcgaggcccaggccatcaagctcgtcaacgaggcggcccaggcctatttcatcggcaacgcccaggtcctcaaacggatggaagtcgccgaaaaagcgctggcccacaatgccaagatcgtcgtcccggccgatacccagctgatcaacgtcatcggcgagatggccgggctggtgcctctgcctccggctccggagagcgtccagaaataatccggggccggcccccgctcacttgacggccgcggcgatttcgggcaaaaagacgttcattccgccccagtcgtcgtcgtaggtcatcccgaggcggacgaccacgagcttttgcgacggcaaaacggcgatcgtctggccctggtagccgagagcgaaatacgcgtcttccggcaacagaggatacgggcgcgtctccggttttcccggatcgccccggttcagccagaagaacgccccgtatcgcccctggggcgcggccggagcgggcgccgtcgcataagccatccacccttccggaaggatccgctcgcccagccagacgccgtcgttgaggcagagcaggccgaaccgggcgaaatccctggccgtggcgtagagatacgacgatccgacgaacgtcccggacgcgtcccgctccatcaccgcgctccgcattccgatccggtcgaacagggcccggcgggggaaattccagtactcctcgtccgaaccgagcgtcttccgcaggattccctggacgatgttggccgtcccggaggagtagttccaggccgcgccggcggggaccgcccggcgcttggaggcggcgaacgcggccatgtcgggctttcgaaagagcatgtcgttgacgtccgagacggggcggtcggcgtaagcttcgaaccattccagcccggagctcatccggagcagctggtcgagagtgatggtccggcgcgagtccccggctccggcccaagcctcgaccgggacagggaggtcgagatcgagccgcccccggccgacgaggatgccggccaggacgcaggtgacgctcttgaccgtcgaccagctcaggagacgggtattcttggtgatccccggcccgtagcgttcataaaccaagcggccgtcgtggaggacgatcaaggcccgcgtccggagaggatgattcggatcggcttctgaaaaaagccggtcgcccgcggcccggatccgggccgcgtcgatcgtcgtccccggcgggacgaggatcagccggtcgcccatcggccagtcgacggactcgggatcggtctcttcaacggccgcgtcgatctccggtttgggccaagcccggacaacttcctccaacgctccgccggccagaagcacggccccgatcccctcgcggaagaccgcttccgccttgaacaagcccgtccccagcagagaacagctcacccgtttctgttcatagtcgaccttcgtcttgaagatcttgtaaagcggatgaaagcccaaatcctcggcctcgaccgcggtcgcgtcgcggccggaaagaaagaccgaggagcacaggatcttcgccttcgatccggtgccgatggacatcatttgaaaatactggtttttaatgacgaggaagacggccgcggccaagatcagaaaaaggacgacaaggacgatccgtttggtccgacgcttgctcatggggacgcgctcctttccctggtttgccttaatttaacccaccttccccggcggactcaagaacaaaagaggaaggtccaaggcccccgagccttccttggggatatcggattccgggacggcctggaccgaagggcggatccgctccccgggggaatggtccgtcggcaaggaatccatggcgaaatcctcgttcctgacggtcgggaacaaggagaggcctgatcaaccagatcgggatttgaagcaggggccgatcgaaatagggttaataagcattgtgtcaccctgttcagttcattgacatccggttcccgccgtgttataaaaccgcggttacgaacgagcggaacaacgatgaatcatcgagatcacgtcaagcgcccggccgcccccgcgcggctccgccccgcccgtccgtctttcctccggcccttttccgtcggcatgatcatgtgacgcccggaagcgggcctctccccgaggccggctttcgggaatcccccgccccctgagttcgttcccggtgtctatccattgattcccggagggaggtcgtcatgccgaaaaccattgcggagatcaacgaaaaaatcgcccggaagaccgtgaaggtcgttcgggcggatcacatgagccgcctcgtccgcgagctcggtccggaaaaagcggccgagaacgtcgacgtcgtgaccacggggacgttcgggccgatgtgctcctcgggcgtctggctcaacttcggccattccgagccgccgatcaaaatgacacgcgtccgactcaacggggtggaggcctacgccggcgcggccgcggtggacgcctacctcggggcgacccagctctccgcttcgcggggcgtccgctacggcggcgcccacgtcatcgaggacttcctccgcggccggcccgtcatccttcaagccgtctcgccgggcaccgattgctacccgcgcaagcgcctcctgaccgtcctgacgctgaacgacctgaacacggccctgctctccaatccccgaaacggctatcagcggtacaacgccgcggccaactcctcgtcgcggacgcttcacacctacatggggacgctccggccgcgtctcggcaacgtgacgtatgccggcgcgggctctctctccccgctgtccaacgacccggactaccggacgatcggcctggggacgagaattctcctcggcggggcggaaggattcgtcaccggcccgggaacccagcacgatccgcaaaacggcttcgggacgatggccgtccagggcgatttgaagcgcatgtcgccggacttcctccgggcggccctgttccccggctacggctgcaccctgtgcatcggcctgggcgtcccgattcccatcctcgacgccgattcggcgcgccgcgcggccgtctcggacgcggagatcgccgtgacgatccgcgacttcggcctcccctcccgggaccgtccggccctccggtccgtcacctatgccgagttgcggtccggacgggtgcgcctcggaggccggatcgttccggcgctccccctttccagcctcgtcctctcccgccggatcgccgacgagcttcagcggcggatcgaggccgggacattcctcctgaccgcccccgtcgtccctctccctgcggaatccgtcgtccggccgctcgaaatccgccggccgaaaacgagcgccccgggggaacaccatggctgaagccctgttccgcaaaaggctccggatcaaggaaacggccgcgacgatcgtcgcggccgagcctttcctccccctcgccgaggcggacattcgaaaacaacgaggacggctcgaggactatatccggcgggatcccggattccggacggcgctcgccccgcgttccgttccgccggaggctccgcccatcgtccgccggatggcccgggccgcgtcccgggccggggtcggcccgatggccgcggtggccggagcgctggccgagtccgccctgcgggcgatggccgaagccggagcgacccacgccctcgtcgacaacggcggagacatcgccctcctgctcgagcgtccggtcacggtggggatcttcaccggcccgtctcccgtccgcgacatcgccttccgggtcgagccccggccgtggattttcggaatctgcgcgtcgtcggggacggtcgggcattcgctgagcttcggccgggccgacgcggccgtcgtcctttcggcggacgtcggcctggccgacgcggtcgccacggctttgggaaacgccgtcaccgacgaggacgaaacgcgtctccgggagaccttggccgccttgggaggaatcgagggcgtggagggtctgctggcggtcgtcgggaagacgctcgcggtttggggcgaccttccgccgatcgtccgaacgcgcgtcgatcccgcccggatcagccggtgagcctcccggccatttcgagaataacgaaaggagaacatcatgaacaaatatcccgtcgccgtgttaggcgcgaccggcttggtggggcagcatttcgtccggatgctcgagggccatcccgatttcgaaatcgcccttctcgccggctcggagcgctcgaccggacgcccgtacgccgcggccgttgaatggacggccggcggggatcttccgtcccaggccggaaaaacaacggttcaaccggcttcggtcgaagcggtcatcgcctcgggagcccgggtcgtcttcagcgccctccccgcctcggcggccggagccgcggaagacgccctccagagccggggccttgccgtgttcaccaacgcttccgcccgacgcggcgatccggacgtccccgtcgtcgtcccggaaatcaacccggaccatcttgtccgggccgcccgccggaaaaccaaccgcggcggattcatcgccgccgacagcaattgctccacggccggcctggccttgctcctggccccgctccgcccgttcggaatccgttccgtcgccgtcaccacgttccaagcgatctcgggcgccggccggcgcggcctggcggcgatggacatcgccggcaactgcgtcccgttcatccggggcgaggaggagaagctggcccgcgagcccggtcgcatcttcgggaccctcgaggcggacggtttcattccttggcccgtcccggtgcgggcgagctgctgccgcgtcccggttcgcgagggacaccttctaagcgtctccgtcgaattcgagggagccgtcggcgaggacgccgcggccgaagccctggcctccttccgcggccttccccaggagatgggcctgccctcggcgccggagcggccggtcatcgtccggaccgaagacaaccggccccagccggctttggacgtctgggcgggaactccggcgagggcccggggaatggccgtgacggccgggcggcttcgctcccggggccgcatcctcgaccttttcggcctggttcacaacaccgtccgcggggccgccggcgcctgtcttctgaccgccgagctggccgcccggcaaggacttctccacgaatagcgaggatcggatgaaatttcaaaaagtgatgaaattcggcggcgggtgtcttcgcgacgccgacggcttccggcgggcggcggccgtcatccggcgggagcccgttccgccggcggtcgtcgtctcggccgtttcggggattaccgacgagttggaacgcggcctggcccgagccgtcaaaaacgaagccggcatcgcccggacgatcgcggcccttcggctccagaacgaccgcctagcctcaggccttctctccgcgcgggagatccgggccgagatcgcggcccaaatcggccatcgcctggcccggctcgaacggctcctccggggcgcggccttgatcggcgaaatctcgccctatgcccgggctcatgtcttgagcttcggcgagcgctgggcggctttgcttctggccggaatcctccgagaggaaggggccgacgcccgggctctggaaagcgagcagatcggcctggcggccgacgacgtccccgagggggcgacggccgaccttgcggccttccgccgggctgttcgaaaaaacgccctcgggatcgaggcgggccgcttcgtcccggtcatcaccgggttttacggcctggccgccggggggcgcctcgtctccttcggccgcaacggctcggattacagcgcggcggtcgtcgccgccgccctccgcgtctccctcctggaaatctggaaagacgtggacggcttcatgaccgcggatccccggcgggtttccggggccaagcccgtcgcccgcctgtccttcaccgaggcggccgagctttcctacttcggcgccaaggtcctccatccccgggccctcgagccgatcgcccgggagaacgggacgatttggatccggcatcttgaccggccggaccgtccgggaacggagatcgcggccgagggaggaacggccgaaaccgtcctgaaaagcgtcacgctcaatgaccggatcgccgtccttcgcgtctccggaccgggcgtgggattccggccgggcgtcatcggggacatcggccggagcctggccgaacggaacgtcaacatcctttcggtcatcaccgcccagacggcgatcaacatccttgtcgccgaggaggacgcccggcgggcccgccggatcctgcggtccgtccgccgcggagtggtcacccgggtggacttggaaacgaacttggccctggtcgcggcggtgggagaaggactctcgtcggagcggggcctggccgcccgcgtcttcgccgcggtcgccggcaacggcgtcaacgtcgagatgatttcctcgggagcctcgggcgcggccgcttactttctggtgcggaaagcggacgccctgccggccgtccgggccctgcacgccgaatttttcgaaactcgggcgggccgtccccgcgccctccgatgctcctgatcttttaatttcgatcctgcccggcgaggggaaaagaggcgccgggccggcggcgctggaaagaaacttttttctttctctttcgtatggaatagaatatcaaggttattttttatttcagggagtcgccatgtccaacgtcctgaccgtccggggattgaaaaaatcctacggcgcccacgcggctctggccggcatcgatttcgaggtccgggcgggcgaggtcttcgccctcatcggcccgaacggggccggcaagaccacgaccctccgcatcgccgccaccctcttgacgtccaccgccggcgagatcaccttcctcgaccgcgatctccgcaaggagcccgatttcgtccgggagaaaatcagctatctgcccgaagaagccggggcctacaaggatatgaagggaatggattatctccgcttcatggccggtttctacggccgggacgccggggaggaaaaggagttcgtcgagcgggccgcggccatcaccgagctcgggaaccggctgaagacgaaggtcggcacttacagcaagggcatgacccgaaagcttctcctggcccgggccctgatgacccggccggtcctggccatcctcgacgagccgacctcgggcctggacgtcctcaacgccctggacgtccgggagatcatccgccgctacgtcaaggaaggcacctcggtccttctctcctcccataacatgctcgagatcgagttcctctccgaccgggtcggactcatcgacaagggccggatcctcgacaccgggacgcccgacgagctcaaggccaagcatgccgcgaagaacctggaagaggtcttcaggagttccctccgatgaaacgctttaaaaacctgctgcagaaggaagtcaaggagctggtgaccaagcagctcgtcatctccctggccttcaccgtcctcctcttcaacgccatcgggcagatcagcaagaaggaagtccagaaggccgtcggaatccagacgatctcggtcctcgaccaggacggctcggagggttcccgggctctgctgaaaggcctggaatcggcccggttcaagatcgtcgaccagacaggcaagggcaaggacgaagccctggcctcggcgaaggccggcgagtcgaagctgcttctggtcgtcccggccggattcggcgattcgctggccgagcttaagcccagcgagatcgagacctattccttcatgcggagcttttccctgatcggagcccggggccaggtcgtcgtccaaagcgtcatctcggccttgaacgaaaccctctccaacgacttcctggccgcgaagctccctggggccgacccggtcagcctcaagcgcccgatcaagagccgggacttcgtcgtcgtccgggaccggacggccgagggatcggccggcttgatcgccggaatgctttcccagcagtcgatgctcatccctatcgtcctgatgatgatcgtcatctattcgtcccagatggtcatctcggccgtggccatggagaagcagaacaagaccctggagacgctcctgacggtgcccatcaaacggacctccatcatcaccgccaagatgttcgcggccggactcgtcggcctgatctcggcgggagtctacatgttcgccttcaagggcttcatcggcgggatgggcgaggaagtcgccgcggccggggcgcgggcaagcggaaccgccctgatgcagaagctcggcctgacgttcgacacgaccggctatctcattctcggcctctccctcttcctggccatcctggtcgccctggccatggccatgatcctgggcgtcctggccgaggacttccggagcgcccagaacatgatcatgcccctgatgttcatggtcatgatcccctatttcatctccctgttcgccgacatcgacacgctctcgctcccggtcaagatcctcatcctggccattcccttctcccacccgttcctcgtttcgcagaatatctacctcggccattacgggatgatcgcggccgggctgggctacatgcttctcgttttcatcgtcctggtgatctacgccgcccggatcttctcgaccgacaagatcctgacgatgaagttgcggttcgggaaaaagaaggcgccggcggcctgagggaggcgcggacgcttggccggcggacggtctctccgggcgagggttcttgatcacggaggagtcgaaaaatgaacgaatccagaaaagtcttgcgccggtcgacgaccaaccggatgatcgggggagtgatcggaggattggccgattacttcggcctcgatgtctcgctcctccgcgtcgtctacgtcgtcggttcgatcctcagcgccgcgttccccggccttctcgtttacgtgatcatgtgggtggtgattcccaaagaggagcgctgagagcccgtccccgtcgagcgggcgatcggggaaatcctcagaagcgggcttccctccggaatagcatccggtccgggatcagctgtttcggtccggacggggccttccaaaacaccttgagctcctctccccccgtccggttgaaataccggatggtgatccgatggaatccggctttcaaggcgatggccccgccgcgctcggccgaagggtggacgccgtcgttgtcgacaacgagggtttcgccgatccagagccggctgccgtcgtcggattccaaggcaaaagcgtaaagcccgtcctccggagcccggatcaatcccttgaactcgaatccgtagttttcgtgccgccgtttttgggagaggtcgatgtggagagcctccccgcggcggatcggattcatccccgcgaattgaggaagggccgtccactcgccctcgtaataagcgaagctcaagccctgcttgaggccgccgcccgggtcgtcgggcgggcggagggcggtcttcctgaacgtttcttgagccgtcccggtgaccggaacgcccttgatgaagccgcgggccgagacgaccgttgtctcggtcaagcgcacggggccggccgccaacggggactcgagggtcggttccgacccgtcgagcgtgtaccggatcccggtgaaggccggatcgcccgtgatggtcacctcgaggacgtcgagaaaagacttggcggccgccgtgatccggggcggggcgtaggatttggtctccgccccggtgacgagaacgataaccgtgtcatcggcgtccggagcctgggccgggacgcggatccgcggcccgaattcccggaactcgaccggcaggggcttggccggggcggaaaggacatacgccgtccggagttcctcggcgatcggaggaagattgagccagccgttctccggccaatcgaaaacatggagaaagatcagggtgttttccccatccttcttctgggtcgaccggccccagcgcaggtcgctgaacgggccggccgtggtcccgtagagggactcgccgttgaccctcatccagcggccgatggccgccaggcgctccatgctcgggccgggaaacactccctcggcggtcgggccgacattcaagaggagattgccgcccttggagacgacgtcgaccagcgtccggatcaaggtccggaccgatttccagttctgatcggcccggttgtacccccagttgtcgttcatggtcaggcaggtctcccaatcgacgccggggagcccccggccgggaacctgctgctccggagtggaaaaatcacccggggcgtcccgggccgccgagaacccctccatcccggaacggtccgacccgacccggttgttgacgatgatcgacggctgaagcgaccggacgtaccggtagagatcccgcccgcggtcgatgttccacgtgttctcccattcgccgtcgaaccacaagacgccgatgtccccgtactgggtcaacagctcccggagctgggccttcatgtaggcgacgtatcgatcaaagtcgccccccgggaccggccggattctttcctcccacggccgccggggcaggtaatccgggtgatgccagtccatgatcgaataataaaagcagagcttcagcccctggctccggcaggccgaggccagctcccggaggacgtcccggccgaacggcgtggccaaaatgtcgaaatcggtctgtttcgaatcgaagagggcgaatccgtcatgatgtttcgaggtgatgacgatatatttcatccccgcgtccttggccgcccggacccaggcctcggcgtcgaattccctcggattgaaccggccgacgaactgatcatagacctgaaggggaatccgggcggtatcgcggatccactcgccataatccgttttgccccgccactccccggccggcacggcgtaaagcccccaatgaatgaaaaggccgaaccgggcctcccgccaccattgcatccggccgtcgcggtcggcctccccttccgccgcggccgctcccgccgataaaaagaccatcgccgcaatgagaaacgccgccgccgttcgcttgttcatctcttcctcctgcctttcatttccggcggatgcctcgcgccgaaggaggcaaacagcatagcctccccccggaacggatgtcaaaccgccccggcggtctgtcaaggcggtcccggagcgtcccgctcaagagaggagtcacgacggaggaccaagcccgacgcgcccgccggcggatcaggacctgaatatcttctcgatctccttgaccgcctcggccagggcttgcttgacctggggcatcttctcgactccggcttgccgggctttctggccgatcgttttgccgagatcgccgagcgtccgcatgacatcccgcatttcatcccgaaactccgccccgtagcatccccaccagttcttcatctgggccttgatctcggacgtctccttggctttttcggccaggaaggcgagaccggattccgtgatggtgtagatctttttcccgtccaggggctgggacgtgacatgccccatctcctccagatactgcagagtcgggtatacggctcccgggctgggcgtatagaagccgttgaactggttttcaagctcgcggatgatttcgtatccgtggcggggtttctcctttaataaatcgaggatcaggtacttgaaatcccccttgtgaaagatccgctcgccccgtccccaattcccgtaatgcggccgatgctgcatttccctttctcccttcgacacatcaagacgttaacgcgatatatctagtaatttaatttgatttcttcatttgtcaagtcgcccgccggcctgaaccgggccggaaaatcggcccttgaaatcgtccggatttccctatacattgagatcaaacagccgttacggagagaatcatgaaaaacgtcaaggacatcctcgccgccaagggttccaaagtctggtccatctcgccccatgccaaggtgttcgaggctttgaagctcatggccgagaagcggatcggggccctgatggtcatggacgacaagggccggatggaaggcatcatcaccgagcgggattacgcccggaaaatcatcctgttcgggaaatcctccaaggagactcttgtttcggaaatcatgaccccggccggcaagatgttccatgtcggcccggacaacaccgtggaagaatgcatggttctcatgaccgccaagcacgtccgccacctgccggtctgcgaaggcgagaagttcaccggcctggtctcgatcggcgacgtcgtgaaggcgatcatctcggagaaagacgccctgatcgaacagctctcgaattacatcagcggcaaatacatgtaagccgggccgtgaggcggacggcggcgggacttgaaaaacatctccattctgtaatatttttggccgcgaaccttcgccggaaacgttaccgaaaggatcgccggtcatgatcatcgtctttgtcctttacttcgccttgaccttgtgcctcggcctctgggaggcccggaaaacgaaatcccagtccgacttcgtcctcggcggcaagaagctgcccggctggatgctggccctctccgagcgggccacgggagagtcggcctggctgctgctcggcttgacgggattcatttatgccaccggcctgtccggcatctggacgggcgtcggctgcctgctcggcatctccacggcctggatcgtcctggcccgcaaattccgggccgaggccgaagcttacaaggccatgaccatgcccgagtacttcgcggccaagttcgcctcaaaggccaacttgatccgggttctgtcgaccggcatcatcgtcttctttttcgttttctacgtcggggcccagttcgccggcgcgggcaagacgatccaacagaccttcggcttcagcccgttctgggggatgatcatctcggccgtcgtcatcctgggatacgcgacgttcgggggattcgtcagcgtcgtggccgtggacacgttccagtccatcctgatgctgaccaccctcgtcgtcacccccgtcatcctcctcgtcaagatccttgcctcccccgtctccccggctcaagccttcgccgcggccggacccggattcggctcgctgaccggggggctggcgggattcgccgccggcctgatgatcttcaacaacctcgcctggtttttcgggtacctcggcggccagccccagctcaacgcccggttcatgggcatgaaggacgaaaaaaacgtccgcttaggccggaacatcgccgtcctctggacgatcatcgcctacagcggcgtggtcatcatcggcctcggggcccatgtcctcttcggccccaaggcggtggccgattccgagatgattcttcccttcatcctgaacaacctgttcccgggctggctggcggccctgctcctggccggggcggtcgcggccatgatctccacggccgagagcatgcttctcgtggccgccacgtccatcagcgaggacgtctataagggcatcctgaaaaaaggccgggcccgcgagcgcaccctgctcttgatttcacgcctttcgaccgtcgccgtcggcgtcttggggctggtcctggccttgacgacgaaagatctcatttattccatcgtcagctacgcctgggcgggaatcggctgctcgttcgccccggccgtgcttctgtcgttctactgggaccgcttcaacgcggccggcgtcgtgaccgctctcgcctcgggtctcgtctccaccgtcgtttggatgctggccgggctggagaaaacggtcaccgcccgggcctcgacgttcatcatcgccatgaccctggccgtgctggtgaccctggtttcgaaaaaaaaggaacccgaaacggcgaaggcctctccctttacgtccggataaaataaagggtcaggatgttctcctccccctcgcggcgataagccgcccggtcggccgcttcccggatgaaaaagatgcccaacccgccgatcttgcggtcggcgaggcccgcttcaagatccggctcggcttcggccaagggatcgaaggcggcccctcggtcgcggatctcgatccggagcgaacgatcctcccctcccgacaagccggcctcgacctctccgtccgcgccggcataagcgtggaggatgacgttcaccagggcttcctcggaagccaggcggatccggccgcgggccgattcgtcaaatccgagccgtttggcgccggcgtcgatgaattcaagaagctcatgaagaaactccatgcgggcgggccgccggaggcgttccatggcggtcggtttccgggccgccctcaccggacggcgtcaagcgccgcgggcagggtctcgaagaccgggatgatggaggaaaagccggacacctggaagacttccctcacccggggctgaagccgggacaagccgagcttcccgttccgggccttcatctttttcgccgccgagaggatgaccctcaggccggcgctgctgatgtattcgagaccgttgagatccaggaccaggcgcgttcccggctcctcgaaccacgttccgagccggccctccagctccggcgaggaaacggcgtccagatggccgatgatcgagaaaacggcaacgtcggattccgtggtcatgacgatgtccatccagtttctcctttgccctttcaggcgcggaatcgcggcggctccccggaggagcccgcggcgccctatgatatcacatcacgaatccccggccgcaagtcagcgcacctccaaaacccggctttcagagtggctgttgaactcgggcgcatacatgcattcgatgtgggccatcccgttctgatagcggccgcagagctggacccgcagctcatattcgaagacataggcgcctttcgggagatcatcgatgaagaaatgagccgccgcgtccttcgtcgcctcgtagtaggccaggccgtcccggaaccggtacgtcgagaggacgttgaccggctcgagcccggagccgcggtgatctctcaggtgaacgtactccatgtcccggtcggtccgcagctcgaggcggacgaccagcgtgtcgccgaccgccagggggccgcggaccggctcgatttccggccctttcctggtgaacgtttttttaaaaaggctttttttcaaccggagcgggttccgctcgtggggggtgatcttggaaatatcctccaggtactgccagtggacgccgccccaggcgatgcccgggtccgtcttgcggacctcgatttcccccatttccggccggatctcggccgcggaaaagcgcttttcatagaagcccgtccccgcctccaccttctccggctcgaccttgcggccgcccaggatcacctcaacgatttcatccgaggccagcaggtccgccccccgaaggatcagtccgtacacggcgtcggccgtggccttggtcgtcttccaatcctgggtttgcttctgtttgagcagccagatccggcattcctcgacggcggccgcgtcaccggccacctcgtcgaaggcctcgatcatcatcgcctgggtttcgatgggcgcccggcgccaccaccaggacgcctctccctcggcccagtaccggccgagctcctcgtccaccttgctccgctccttgagcgaccgggtgatttttcgagcggtctccgcgtccccgaaccggttgaggcccagggcgagatgggcttggctctggcggctgtcgagctggagccagaaagccgctccctgccccaggaaatagtcgagggctttcctcgaagcgtccggaatcgggcatccatccaggaaaaagctccgggcataaagataaagagcgatcgacgggctgaggttgttgagcttttccgtcttgtccgccaggatccgttcatggacctcccggatccaggaatccagccggccgaccgcccggagaaccgcctcccgggcgattcccgggacgcccagatgctcgagccggccgaagccggtcacgatgtagagggtgatgtagtcgttgcccgggccacccgggaaccagggccacgacccgtcggggagctgcatgtcgaccagcttttgaacggcccgcttcaaggccggggccgtcgtgttctcgtcaaacaggagtccgatgttccgcttggcctgcgattcgttcttggcctcgaccacccagggagactcctcgagaaggacgcttttcagctcctggtttttctccaggttggactggagggccggggttcccttccacagctcgaagacccggcggatgcggggatcggagccggcgatcttccgggccagggcgttggcatacaaacggttgaagacctgctcggagcactcgtagggatattccatcaagtaaggcagcgcctggaccgcgtaccaggccggatttgaagacatctgcaccgtcaagccgagggaccggagagtcgtcgagccggccgattgcgcgagcttgtcgaaccggaagcgcttttccccgcggccgctgatccacagcgggatcgattcccggaccatcaggctgcggctgagaacggggaccatcccctcctcgccgtcggaaaacccggccgcggccgcgaccgcccggaagccgacggtctccgcgccgtccggaaccgtgatcggccaggaaaacgtccgcgactgcttggccggaatcgccatcgaaagcttcggattcgcgttggccagcgccccgtcgagcggcgcgtcgttgcgcgggtcgaagaagcggagctcgaccgcgccggccgcttccttctcggtcatgttggtgaccttaaccgtgaattccaggacatcgccctcccggaggaagcggggcggattcggctgaaccatcagctccttctgggtgacggccgccgcctcgatcgatccgcttcgcaggccggtcgtgtgggcgaagccgagaaagcgccattcggtcaaggcctcgggcatcttgaactcgagggtgactgttccttcggcatcggtcaggaggtggggatagaagaacgcggtttcgttgagattgacccgggcctggatcgaggaaaggtcgatcgccggcggcggcgggccggagtccttcccggcttccttttcgccggcggaacctcccaggacgcctccgattacgccccccgagacttcgttcttggcttcccgagaggcggccatgggcgccgggacggcttcggtcgccatcaggacccggtcgccgtaatcgaaatcgaacagcgattccgtgatcatccgggggaaatggatgtaaacggcctccccataagaacgggagggattgagccggtcgaaaaacgtccccagcggctccgcccggttggtgaaccccgaccggagatacgtcgcgtcattccggaaaaacgcggaaatcccgccgaagccgtgcggatagaactgatcgagcgaggcgtcgtaaagggaggcgaccatctccgccgcctggacgtccgctttcggcccccggacctgaagcgaccacgtctcgtcctggccgggccggagcttcgaacggaacgttttccaccgaaggtcgagccgcttgttcgtccagggcacggaaacccggcggtcttcccggtacaagcggttgtccttgacgatcgccgccgagacgacgaaaccgccccggaaggcctccgtgaccggaacgcggacgacggcttgggtcgcggtcccccgcgtccaataacgttgcaggcgccggccgtcccggtggacctcgatcaagaccggaccgcgctcgtaccccgtcccccaaaacagctcgaacgtcccgcccggctcgaccgagcccgagcgggcggcggcatgaaacgggacggggacggcgaatcgatcggcggccggatcgaggacgaggaaagcgaagcggctttcgaccgccgttccgtaacgatccgcggttttgaggatcgcccggtaggctcccggcggaagatcccaggacagccggcagggagaaccctcgaccgcggagacggcgaattccttccgtccggccaggcgtccttccggccaccggcgccaatccatcgtctcggaatccccggaggcggcgctcccggagggccgaacccggccccggtccccgctttcagcgaacagatcccgcgggacgggacggcccggtcccctgagggcgtagacttcgacgacgccctcggccgcggccggcttgccgttcagcgtcgccgccgtcgcggtcaagacgaccggctcgcccttttcctgccagtccgagccggccaaaccggcctcgagggccgtgtacccggcccggatggttcccgccgcgctccgcgtttcccccgccccgtcggtcacgtcggccgtgacggtaaacgtgaaaacgggctgggaggagggggaggacttcggatcgggaacggccttgaaaacgaccatgaactttccttcagcgtccgttcgggacgtcccgtgggcgatttcccgggattccccgcgggccggcgtgttccaccaccaccagacgggatagcggacctcccggatcacgcggtatttcaccaaggctccgtcgaccggcgcccccgcgtaggacatcgcctcggccggcacggagatctcgtcattcagacggaactccctgtccggaacgtcgattttcacttgaaacttcggacgcttgtattcctcgacccggatggggcaggatccccggggattctcggtcgaaatcgtcatcgtccccgtcaggcggtcggccggggcggtgaaggccccgctgaacgacccgaaatcgttggtcgtgagagtcaggacggaggcttcctgggcattggcgtcccggagaaccacccggacgttccgccggggcaggatccggtaatcggctcggttctcgtccgccttcaggcacaaacccttgaagtggatcgtctgtccaggacggtagagcgagcggtcggtgaagaagaccgtccgttccctttcgtaagaggccggccggccggaccccgttaaaacctgggtttcaacgacttcgatccccttctccccccgggcgaccaaaagacggttggaataagattcgggcgcggcgagggcgaaggcgccggcgtcgtcggtccggccctcgcctcgtttgaccagcctgtccgttccgtaatcccaatcataaagggagacggacgcgccggaaacgggatcgcccgtcaccccgcggacgacgaatccctccaaggcccgtcccgccccggccgtcacaatcccccattcgctcacccagaacgagccggcttggatcttgttctttccccgggaaaaagccggatcggcgctgactaaaaggcgataaaatcccgggggcagggccggagccgcgacccgctcggcgcgcgcctggaagtcggccgtcgccgggagatcggccgaccaggcggccgccggctcccgctcgagaagctcgcggacgggctcgtcacccggccaaaaaagatcccccgcgttttcggccgccaaccgcgcctcgaagtcatcccggacggcccggaaatgaagggcggtcaggttgcggtagcggacgtccaggaccgatgatgtcccgggggagacgacccgttcgttccggacatcgaaatcgcgggaggcgatgtcggaaatcagggcgtcgcagttgcgtccgcccagggaggccgggtgggcttttcgtccgcggtcggccagggcgtacgcctggaccaggtcgccctggtttttcaattcccgggcccggagataatcggccaggctggaaaaggccgaggccggattcttctccgcgatttccttcagccgctccaggtaccgggccgaggcggattcgccggcggccaggttccgcatggcttccaagcgatgaagatcggcgtccaggaacacgtcccggtcccggtcgccgcggtggaattccaaaaggctttgatagaggcgaagcgcccggagcgccggcgaatcctcgtcggtcgtctccggccggtaaaggatgaattcgtccgccgggccgaggacgggggaatcggcttcgaggacgaaggcgtcctcgggggcggccgcggcccgctcgcccgacacgtagaagccgagagcctcgaaagcgacgaagtcgaacatcgtcggccgcaaggactccggcggatcgcccggctcgagaaaatcgcgatagaccgaaacgggcgttcttttcaaagacgcctcatccttcaggatgtcctggtagagggcgtcgatctcccggacgatccggcggagatcccaggtcgtgaaatccttctcgtcgattccgccggcggtcgccgagcgttgggcgaaccgccaccggttccgggagaaataatgccggtaccattgggccaggatggtccggagcatcgttttcatcccctccggggcctggtcgatctcctcccggatccgggccacccgggccccgggcttgttgccctcgacgaccgactccaggaccaggcggcgggtcagggcccggagagcctcgccctccctcttctcctcgagggacagccggacgatctccttcaggtgctcgatggccgtccgggggaggccgtcacggtcggcggcctcgaccagcttccataaatccgcggtcgaaaccttcggcttgtcctgacccggctttagccgaacggcgcttccggggacggtcgacaggaaggacaggagcagaacggcgggaaccgcttttttcagcgacggcttcatgatctctccttgcaccggaggcccggcattcgcggatcttcattcagaataccttttggatccggattttattccattataattcaaacgggaggaggcttcaccccggagatcggaaaaagccgcccggaccgggttttatgataaaatgcggaccgcgaaacattccggagcaatcaacatgaggcgtccatttgtcggcgcgattttgggaatgatcgttttcctggccggccccggctggtgggcggcccaagcggtgaaaatccggatcatcgtcgacgagggccatgtccggcttcttcccagcccgcaaagctcgctcttgaaaaccgtgccgaagggagccgttttcccggccgacgacatcgagaacgattggtaccgcgtctttcttccgggcgggcggggcgaatacgacctgatcggcttcatccatcgggacgaggccgagaaggtcgaaacggcgtcccttcgacccgaggaagggcccgccgttccggagccgtcccggcgtcccctcagcctcaagatctccggcgggacggcccgctgccggacgggattcccgaacacggtccgggaatacctcggcgcttatttccgggccgaggcggccgcggccaagaacctggtcgttctccagggggacatcccgcccgttcacaacggttacaacgcggccgccgagctcctcgtcgaattcggccgcctcggcctcggcttgggagcggaatacgtccgggtggaaagcaccgggtcgatgaatttcgcgacaaagcattggacgccggatctttattcgttttccatgaccgaccgcctgacggtcgtccccgtccgggccaatgtttatgccgatgtcctcaggtcccggctcggccggattctcgtctacggcggggccgggctgtatttcggccacttctccgacgtctggagcggagtcaacgagaaaggggaaaccctttatttcagccagagggccgacgcctcggccctcggctttcaggccggcctggaaatcgaaatccgcctgtcggaacgcctcgccctggtcgccgaggcggccggccgccgggccgtcatcgacggcttcacgggcacggccgaggggacgccgggctggttccatcccaagtccggaatctcagaagagccccgaagcgggatcctctattcctacgagctgcagatgacgaccgacggcccgtggattcccgagctgttgatctacgaggctttgccgacggccaaaagcctggggttgagctcccggcagcgcctccgcggcgcggccgaggcccggcttgacttcaccggatattcagcccggctggggctccggttcaagttttgattttcatctcaaaggagagactcatgaaatcgacgcgttttccctcgcggcggacggccgccggaatcatcctggcggcgttcctggccgcgggatttcttcaagcccaggagatcccgcgtccgccggccgcggagaaaatccgcaaggagctcgcgatccacggccagacccgggtggacgagtactactggctgaacgagagggccaatcccaaggtcgtggagtacctcaaggccgagaacgcctacgccgaggcggtcctgaagccgaccgagtctctccaggagaagctggtcgccgagatgaacgggcggatccagccgacggacatgtccgtcccgtatttcgaaaacggctactggtactacacccgtttcgaggcgggccgggattacccgcttctctgccgcaaggccaagacgcttcagggccgggaggagatcctcctggacggcaataaaatggccgccggaacgagctatttccagatcggcgggacggccgtcagccccgacaacaagatcctggcgtacggcgtggacacgctctcccggcgtcaatacaagctccgcttcaagaacctcaagaccgggaaaacctatcccgaggaaatcccgatgaccgccggatacgccgtctgggccgacgacaataaaaccgttttctacccggtcatcgacgattccctccggtcttataaaatcttccggcatgccgtcggcgcgccggcctcggccgacgtcgagatctaccacgaggaagatccgacgttcgcgctcgggctcgacaagagccgctcgaaaaaatacatcttcctcgtcgcctccagcacgctgaccaccgaataccgatttctcgaggcggcccggcccctcgacggcttcgccgtcttccagccgagaacccgcggcctggaatacaacgtcgaccacctcggcggcgttttcaccattttgaccaacgaccaagcccgcaatttccgcctgatggaagccgaccccggccggacggcccgcggccaatggcgcgaggtcatcccccaccgggacgacgtatatctcaccggatttcatttgttcgacgatttcctggtcctgcgcgagcagaaaggcgggctgtcccatctccgggtgatcccgaagggggaaaaagaaggctatgacattccctttccggacaaggcttacatggtcttcgccgctccgacgcccgagccggggaccgcgcttctccggtatcattacaactccttgaccacgccgccggccgttatcgaattcaacatgaagacccgggaatcctccatcctcaagagccaggacgtccccggtttcaatcccgacgactacgcgacggagcgcctttcggccccggcctacgacgggacgctggtgccgatctcggtcgtttaccggaaaggcgcccgggacaagggcccggctcccttgcttctctacggctacgggtcctacggctattcgaccgacccgggtttcaacgcgccgcggatctcgctcctcgaccggggcttcctcgtcgccctggcccatatccggggcgggtccgagatgggccgatcctggtacgaggacggaaagctcctcaagaagatgaataccttcaccgacttcatctcctgcggcgagtttctcgtccgtcacggttataccgccccggatcgtctcttcgcccagggcgggagcgccggggggctgctcatgggcgcggtcgtcaatctccggcccgatctctttaaaggcatcctggccggcgttcccttcgtcgacgtggtgacgacgatgctcgacgactccatccccttgacgacctccgaatacgacgaatggggcaatcccgccgatccggttttctacgagtacatgatgacgtattccccgtacgacaacgtccggcccaaggcctacccggcgatgctggtcacaaccgggctccacgattcgcaggtccagtattgggagccggccaagtgggtcgcccggctccgggaaatcaagaccgacgaccatatcctcctcctcaagaccaatctcgacgccggccacggcggcgcctcgggccggttccgaagcctgcgggagaaggccgtccagtacgccttcatcctcgatctggccggcatcaaggaataaaaagaatcggacggcggcatctgagaataaaggggcagcggtgagcaacgatcctccgtccgggccggcgcccgcccctccggacgacggaaatatttcccgagcttgtccggaggaccggccgaacatcctcccgggtcttttggagaaagcgcgggcggcccagcgagactgggccgccctgagcttccgggcgcgggccggccacgttctggccgtccgggacgcgatcgtcgccgaggccgaccgcatcgccgagatcatctcccgggacaacggaaaaacccggatcgacgccttgagcgccgaggtccttccggcggccatgtccgcgacctattacgccaaaaaagcggccggattcctgaagccgaaaaagatccgggcggggaatatcctcttcctcaacaagaaatcccgtctcgagcatgtcccttacggggtcatcgggatcatcagcccctggaattatccgttcgccatccccttccatgagatcgccatggccttcatggccggaaacgccgtcctgttgaaagccgccagccgcaccccggaggtcgcccggctcatccgggatatcatcggcgccggccggtttcccgacgggctttttcatatcgtgaacatggccgggcccgtcgccgggctggcgttcatcgatgccgggatcgacaagctgtttttcaccgggtccgtcgccgtcggcaagaagctgatggccgcggcggcgccgcgcctgcttccgctgtcgctcgagctcgggggcaacgacccgatgatcgtctgccgggacgccaacctccgccgggcggcggccggggcggcctgggcgggatactccaacgccggccaatcctgcggcggggtcgagcgcatttacgtggaaaaggacgtctatgaggagttcgtcgcgatcctgggcgggatcaccgaatccctcacgtacgggatcgacgcgggcggcggcgtcgacgtcggggcggtggccacgaaaaagcagctcgcggccatccgggcccatctggaggacgccctgggcaagggagcccggaaaacgtatttctccaagcgcctgaagggaagcgcggacgggttgttcttccccccgatggtcctggaaaacgtcgacgaatcgatgatcacgatgcaggacgaaacgttcggcccgatcgtggccgtcgcccgggtggagagcatcgaggaagcgatcgagaaggccaaccgctcgaacctcggcttgaccgcctcggtctggacgcgcgaccggaacaaggggcgggcgatcgcttcccggctggaagcgggcacggtgaccatcaacgatcacctgatgagccacggcctggccgaaacgccgtggggcggattcaaggaatccggcctcggccggacgcacggcgccctcggcctggaggaaatgacccggacgcgggtcgtcgtcgacgacgccctgccgtttgttcagaagaacatgtggtggtaccctcacgaccggtcggtttacgccggcctccggggagggctcgatttcctttaccggaagacgatttccctgaggatgaaagggctggccaagctgctgcgtgctttcgtccggacctttcaaaaataacgtgggagtccgctccccgcggacctcgtatcccggcttcggccgcgccgcgcggcctcccatcccgtaaagaaccgaaagaaagcccgcggcccgattcccggcggcgggcgtctctttcgagccgcggccgcgacggccggggaacgaagaccgggccgaagacgatatccgctttccgggccgagaggagaatgaaagcggcctcgatcccaacgcccgggatgaacgccccggcccgccggccgaacaggggccccggcctgcgatccacgaccgggcggcgaagagcgcccgggccgcctggacatcccccgcggttcagtagaacggcgtctcgaaggacgacttgatttttttcgcggggagggccaggccgttttgatagagcgtcaagccgacggcctgccccgaggcatccagggtgaagacgatccgggcgtcggcgaccttgagaaagaaatcggtttccgactcgggataaagctcgaccttgggctggccggtcgccatccccatcaaccggccgtcttccttggtgatcgtgatcgtgaaatccgggctgagctcatagacgccggtcagccggtcgtagagggccggatcgagagaggcctccacccggggggcgggaagcggccggtccgtccgcgcataatcgtcgaccggcccgatccgctcggtgaactccaagccctcgaccgctccggctttccgccggacccgcatccggctcaacgaatccttgaagaaatactcgtccgccgagagggggaacagctcgtatttggctccgccggcccgctgggcgaagaggcggcctccctcccgggtgatgaaacggtcaacgcccctttcgttgacatagacgccgacgagcggctcgaggtctttttcctccaaaacgaccggcgcgggatcgacgtaaggatctcccaaggcgagagccgccaggcggaaggcgtcggcttccggatcccgcccgtcgccgatcgcgttggttaaaaggatgaccgaaacgccgtcctcgggggcgaacaacatggccgtgatgaagccgttgattcccccgccgtgctcgatgatccggcggccgtgatacgtcgagatgaaccagccgtagccgtacccggtcgtccggccgttattgagaatgccgggagtgaaagccttctccagcgtttctctcttgatcaggcggccggcgagaagcgactcgacccagacggtcatgtcgtcgaccgaggagagaagcgccccggcggcatacggctgggtcgggctgaggtagggcgcgttttcgtatccctcgtttcccttctggtatcccccgatccggcgggggatgatccgggtcgggctgtcgtaatcggaatgcctcatctccaggggctcgaagatttccttccggacgaactccgcgtaggtcatccccgagaccttctcgatgaccgccccgaggagaacgtatccggagttgcagtattgccagcgctcgcccggactgaactcggccggcttgtccttgaacagatccacaagctcctcgagcgacatgtccttccgccggagcggcagccattccggcagatcggtatagctgacgaggcccgaggtgtgggtcagcagacgctcgagggtgacggcctttccgcccgtcggatagccggggagaaacgcggtgacatcgtcgtcgagggacagcttgccctgctcggccagcttgaggattccaacggccgtgaactgcttggtgatcgatccgaggcggaagaccatgtcgggagcgatggggacgccgagctccatgtcggccaggccgtagcctttccgcaggagaatccggccgttttttttgaccaggacggccgccccgggctcgccgggcttgtagatcgaggagagaaaggcgtccattcggccggccaaggcgtcatcggccgcggacgcggcccgcgtcacggccggatttcgggcgaaaacggccgacggggagaggaaaagcgctgcgaacgcggccaaaaccgccgcggcgaggcggatccggatgttcttcataatcgggctccttgcgtccgattgtagaggcaaaacgagcgagacacaagactcgggattcgcgtttccgcggccgccggaagatcgccgggcggcaaagccgggaaacgggtgccggaccggccggcggcgacgacatcgcccttaaacgaacgaccatgccttcgttttgagggacgggatccggcccgtcgagcgagcgaggaacgaccgaggcggaagagttcccgtcgccctgaccgtccgttgtgcggcgttgacttgcccggacgggggatatataaaaggagaaatcatcgaacgccgaaaggaggttcgcatgaatctctcgattccatccctcgtccggatcgccctcgccgcggccgttctcgccgccggtccggccgccgcggccgccgttcaggatgccggcccgaagcccctgcctgtctgttatgaggagctgacctctccggacttcgtccgggcggtcgaggcgtcccgttcgacctgcgtcgttcccgtgggcatcctggaaaagcacggcccccaccttcccctcggcaccgatctctatgagtgccgggagacgtcgcttcgggcggccgccaaggaatacgcaatcgtctttccgccttattatttcgggcagattttcgaagcccgccaccagcccgggacgatcgcctacagctcccatctgatcctcgacctgctccaggaaacgtgtgaggaactggcccgcaacggcctcaagaagatcatcctggtcaacggccacggcggcagcgagcagttgatgcagtacttctgccagattcagctcgcccggaaaaaggattatgtcgtctacctgttccaacccgagccggacgccgcccggcaggcccggatcgaccaaatgcgccggacaacgctcgacggccatgccggcgagatggaaacctcccagatgctggccatccgtcccgacctcgtccgcctcgaccaggccggaacgcaaagcggagagaaccaggaccggctggccggcctgaaacacgcttatacgggcatctggtggtacgcccggtatcccaaccactatcaagggtacggcagcgccggccggaaagagctgggggaggccgtcctcgatctcgaggccggtcttctggccgaaatgatccgggcggtcaaggacgacgccgtctccccggccctccagaatcaattcttcgaggaagcggaaaagccttcggccgcgaagccgaaaaagtgagccggacgccgcccgtgccttgtccgcggaggaagccggcgatataataaaacaacgtcattctgatgatccccccggaaggagagaagcatgatgaataaaatccctccgaccttcttcgtcctgtccgccttgatcctcgggccgatcctggccgccgccgaatccgttccgatcatcgagctgaaggagaactgggccgtccggtcctcggccggcctggccgccggcggggaagatctctcccttccgggcgccgcttttcccgacgcgcgcccggccatgatcccgacgaccgttctgtccgccctcgtgaaaaacggcgtctacaaggatatcttcttggccgacaacttcgccaagattccggccgagccgttcgccgtcccctggtggtttcggacggaattcgacgtcccggccgtccccggccgcggccgcgccgtcctcgaattcgacgggatcaattaccgggccgacatctggctgaacgggaaaaagatcgccgacacatctcaaatctacggcgcgttccgccagttccggctcgacgtcaccgacgggatccgtcccggagcccgaaacgccctggccgtcatgatccttccggtcgagccgggcgctttgaccatgggattcgtcgactggaacccgaaagcgcccgattccaacatggggatttggcgcccggtccgcctccgcctgaccggcgacctggttgttcattctccgttcgtccaaacgcgtctcgatcttaaaacgctgaaagaagcccggctgaccgtgtcggccgaaatcgaaaacaaggccggcgaaccccgcgagggaacgctcaacggacggatcggggacatccgcttttcccgccccgtcgccttggccgcccatgagaaaaaaacggtcgcggtgacgccgggggactgtccccagctcgtgatccgcgatccccgcgtctggtggacgcacgatctggggacgcccgagctctacaccttgaacctggaagcggccctcggcggacaggtctccgacgaggcgtcgacgcggttcggcatccgcgagatcgccgatgacgtcagcccggaaggccgccgcggctacgtcctcaacggccggaggatcctgatccgcggcggcggctggaccgacgacatcctgctcgacaatcctccggacaaggtccgggcccaggtcgcctacgcccggcatatgaacctgaacgccctccgggtggagggtttctggggcaccgggccggagttctacgacttttgcgacgagacgggaatcctcgtcatggccggctggagctgccaatgggaatgggagaactatttcggcaagccgaccgacgaggtgtacggcggcctcctgaccgccgaggacttcgacctggcggcccgctcctggcgggaccaggtccgctggctccgcaaccaccccagcatcttcgtctgggccctggccagcgacctcatccccaagccggagctcgagaaatcctaccgggccatcctggccgaggacgatccgacccggccggtcctgaattccaccgggagcaaaacctcctccgtcagcggcgattccggcgtcaagatgaacggcccttacgactatgtcccccccgtgtattggttcatcaacaaaacggacggcggcgccttcggtttcaacaccgagacggggcccggaccccaggttccgcctctcgaaagcctccggaaaatgttcccggccgaccgcctctggccgatcaacgacctgtggttttatcattgctgccgcggcgagttcaacgacctctcccggtacaacgaggcgatggacaagcggctgggaccgccgaccggcctggccgattacctccgcaaggcccaattcatgaactacgaggccatgcgggcgatgtacgaggccttcgtcatccgccgccccgtggccacgggcatcatccagtggatgtacaattcggcctggcccaagctctggtggcagctctttggatacgatctcctgcccaacggggcctttttcggcgcccgcaaggcctgcgagccgctccacatcctctacgacctctcgacccgggaagtattcgtcaccaacgacgcgggccggccttccgggccggtccgggcttccgttcaagtcttcgggctggacggagcgcgccggtccgcccgtgaattcccggtcgccctggacgccgacgacaagaaaagcctgggcgtcgtcgctccgccggccggcgcggccggggcctggttcctcgacctccgcctccacgacgaggcgggcggcttgatcaccgacaacttctacgccttgccgctccgcgatgacgtcctcgacgacgcgaagacggaatggtacgtgacgccgatcaaggaattcgccgatttgacgggcctggccgcccttcccccggcagcgatcgactgccgggaggaacggaagaccgacggcggatgcctggaaatcgcggcgacgctgaaaaacacggcggccgtcccggccttcatgatcgagctcatgattctgaacgaaaaaaccggcgaggccgtcacgcctgtcttctgggatgacaattatctgacactccttccgggcgagacccggacggtcaaggtccggatcaataccgccgggctggacggcgcgccggccgtcctcaagatcggcggctggaacgccgtccgggcggaaaggtaagatcatgaagcgcaaccccttcctcgtcgttctcgttttcctcgtcttcttcgtcatttcgctcgtcaccaacgtcatcggggccatcaatcccgacgtcggccagagcttcggcctcagcctgacgttcgtcgggctcctggccttcgcctttttcgtcgcctacggcgttatgtccatccccgccggcctgcttgtcgagcgctaccgggagaagccggtcatgatcgcggccttcggcctggccctgtccggggccctgctcatctcgctctggccgagctatcccgtgtttttggcgtcgctcttcctcatcgggaccggtttcgccgccctccaggtggtcatcaatcccctgctccgcgtttccggcggcgaggagcactacgccttcaactccgtcctggcccagctcatcttcggcggggcttcgttcctgagcccgttcctctattcctatttcgtccagaacatcggccggtccggggcggaaggcaagccgctcatcgggctgatgaccaagcttgtccggcccggcttgtcgtgggtctcggtctactggatcttcgccgtcatcctcctggtcatgatcctgatcctggcggcggcccgcttcccgatcgtcgtgcgcaaggaggacgagcgaaccggggcctgggccgttcacaaggccctgctccagaaccggaccgttctcctcttcttcctgggcattttctcatacgtcggcaccgaacagggcgtatccttctggatctccaagttcctcaagacctatcacggctacgaccagcagacggtcggcgcgcaccgcgtggccctcttctggctgctgatgaccctcggcggcgtcctcggcctcatccttctgaagctcttcgacagccgcaaggtcctgctgggcttcaccggcgcggcccttgtcttcctgaccctggccctgttcggccccgggccgctggccctgatcatgttcccgctcatgggcttcgccgcctcggtcatgtggccgatcatcttttcgctggccctcaactcggtctccggccaccacggctccttttccggcatcctctgcaccggcatcatcggcggggccgtcatgcccctgatcgtcggccgcctcggggacgccttcggcctgcgccagggcatgttcgtcctttacctgaccctcggctacatcttctcgatcggaatctgggcccggcccctcatcgtcaacgagacattccagcggcggaaaaagaggaaggaggcggcatgagcggcccggccgtcgtcggcatcgatctcggcggcaccaacgtccgggccggaatcgtcaagggccaacggctgatccgggtcgcggcctcggccgttccggccgaccgtccccgggaggaagtcctggaggcttttttcgccctcgccgaccaagtcatcgaccggtccatcgaggccatcggcgtcggcgttcccagcgtcatcgatctgaaggcgggcgtcctctacgacgtccaaaacattccggcctggaaggaagtccccctcaaggccttgatcgagaagcgctacgggattccggcctacatcaacaacgacgccaactgcttcgccgtgggcgagaaatacttcggcctggccaagccctacgaccacgccgtcggcttgatcgtcggcaccggcctgggggccggcctcatcgccaacggccggctctacgccggatccaactgcggggcgggcgagttcggaatggtcccctaccgggatggaactctcgaggattacgccagcggccgttttttcaagaccgcttacgggacatcgggccgggagcttttcgaccgggccctctgcggcgacttgaccgcccgggccgtctttcgggaattcgggacgcatttggccgaagcggtcaaggtcatcctctttgccgtcgatccggagatcatcgtcctcgggggatccgtgtccaaggcgttcgcctacttcgagcaaacccttcgggattccttgagcaattttccctactcgatcacgatccgcaacctcaagatcgacgtctcgacgaccgagcacatcgccatcctgggcgcggccgccctgatcttcgacgcgcggaaatgaacggacccccgctccggccgcggacgatgtccggccggcgcgtcctcgccctggccgtcctcgccctggcggcgggaggaatcccggccggagggtgcggccggaggccgccgcggaacacggccccggatccctgcctcgtcttccgctgcgaggagggaggaatcatccgcggccggacggaccgccgggagatggccttgatcttcaccggcggcgacttcgccgacggaggcgaagccatccgcggcgttctccgggagaagcgcgtctccgccgggtttttcttcaccggcgatttctaccggtccgcttcgaacacggccctcatccgcggcttcatcgccgacggacattatctggggccgcattccgacaagcatctcctctactgctcctgggaggaccgggcccggacgctcgtgacccgggaggaattcgccgccgacctgcgggccaattacgagatcatggaaacgttcggactgcgccggaaagacgcgccctttttcatcccgccctacgaatggtacaaccgggacatttcgggctgggcccgctccctcgggctcgtccttttcaatttcacgcccgggacgtcctccaacgccgattacacgactccggacatgcccgaatacttgtcctcgcgggagatctgggaccggatctgggaggccgaagggcgggacccggacggattcaacggattcatcctcctggttcacatcgggaccgatccgaggcggacggacaaattctatgcccggctggaccgtctcatcgacggcctcaaggccaaagggtaccggctcgtccggatcgaccggcttctccgagaggctatttccccgccagggaatccaccagggccttcagccgctcctgccggggattgatcttcagcgactgattccaaacatccagggcggcgtccttctcccccaactggtaatgacaggtcccgatataattgaggatctcgatgtttgtcccggcccgggccaggtaacggcggtaatgggcgatcgcttcccggaattcccccagcgactggcaggcgcggccgagtccggccagcacctcgggagcggcgttctcgtcttcggccaggggaaggagcacatccttggccttccgggactcccccaggagatagagcgcttgagaatagccggaggtgaaccgctcgttttcgggatgtttctcataggcccgggccatcgcccgtcccgcctcgctggattttcccaagttcaaatactgaagacccaaggcgtagtcccactcctccgcgtaatccgcgccggttacgccggacaggacccgtggtctcgccagccgcccgggaaggccgacttcaaacggcgcgccccggcgggcgagttcccgccccgccccgtcaaggagcgtgacttcaaggtcatagtagccgggcttgagctcccggagggattgttcgagaaagaacgtttccccggctccggcttcagccggcgtccgggtttgggacaagaccgggacgctgtctttgagaacgtcggctcgaatccgtcccccggccgtccaagcctccggaaggccgaacgcctggaagacgatccgcatcgtgtccgcggcgacaaaacggtttcggacgtcgccgaggagctgccgtcccccgattcggaaaggcaccgcctcggccgggccgaaggcggcggtttcggctgaatagcccaggaacaggctgcccaccgccggcccggccccggggtccgggatctcgatcgccgcctcaaatgagccgaattccttggaaacggtgttcttgagcaggagatcgaatcggaaacgccccgggacgcacggaaaaacgtcctggaagacgatcgacgtggcccggatctcgccgacatcggcgtcgttgaacgagaggggaaacgatttttcgaattggtagacggtccggccgtccacgtcggtcagccggccgttgaaggagaaaaacgcctcgttccggccgccggaggacgcgagcgtcaagcgggcgggcgagaccgcgtaatggatcagggacgtgccgtcgccgcttcgggagacgtagagaagcgccccgacatcgatgtaattggccgtgtattcgacctcgacggcgtccttgtagcggaggagggcctcggcataggcatccttgatttttcggcggggcgagtcgaagatatccgccagaagcgtctccgacgacagcgacggcgtccgggacggacggcgttcgccggggatcaaggagaggacctgggaagccaggttgggggccagctcgcggagatcccggtaagcctgctcatcccgggcatcgcccatggccgtcgcgatcaggctgcgggggccgtcggccgccggggaatacaggacataatcaccgaagccgttgcgcttgaaaaaaataatgttgaaggccaccggcagcgtcgggaatcccgtatcctggtagaaccagatctccgtcggatggacgttgttgatgtcgtcgaacgactcgatgttcctcggcgggccgagaacgatatagatttttccccggtccgtcttccagcccggaaggcgggagccgcggccgtacatccggttggcgtactggaggcggcggtaatgctcctcccggaactcgttgcgcggcgtttccggcacggggtcgcgctgcttccagaaggcctcgatgaagatttcgcggctccggtcggagtcgagcttgagaaagacgtcccgctccgtgggggtgatgaggaagacggcttcttcatcgagccagatccggtacttctccgggagaacggccgatttcgcgacctggccggcggccgggagcgcggccatcccgatcgccaggagtacggcgccgatgcaggacatgcttcacctcgagtcagatgatatccgattctccggcggcggacaacgccccgcccgggctgaaaaaaagcccggagggccggggggccctccgggcggactggcggccgtgcggcgccgagtcgaacggctcctagaactggtacatgaggctgaagcggaaagtgcgcggcgtgacgatcgatccgacgcgcccgaacgaatactggttgtcgatcgtggtcggcgtgtccgcgttgaagacgttgaacgcgtcgagaacgaccgagatcgtcccgaacttgggcagcacgaacgacttttccgctctcaggtcgagaatggcttgggtcggaaggtaatcgggttcgacgctggaaacgatcgagcccacgccccctccgatgattccgccttcgggattggaccactcggaatggaccgggatctcatcaagcttccagatggggcggcccgtgtggagccggaagcgggcgcccaagtcgacctccacggtggggatcgtgtacgatccggagatcttgaattcgaacttcggcacgaagggcagggggccggtcatgttgttgatggtgtagttgagcgaacccatccaggtgttgtcggtgaacatcgggccctcggcgttcatactgttgccgaaaatccggttggccattccttccgagtgcgagtagaggaaggacgccatcatctgccagcggttggacagccgcttgttgaaaacgagctggtagcccatgtacatccggcgggctttctggccgtcgaactggtccatgttccggacctggaaggtcgagttcccggactgtccgagccagtggatgtcgcctccgtcgatgaccccgtcctcgttataatcgagccacttgatgctgtagagattgacgacttggcccgaggaggtcgtgaaggggatccggtcgtatgcccattcctcgccggtatgggcgttgatcggcacgttggcgaagatgttgcccgcgtacttgtagatccaggaggcgctgaccgagaagtccttgaggatctcccgctcgatgttgagggtgatctggtcggtgtattggtccttgaggccctccttgacgttgagctgccaggagaagaagtcctgcggcgcgtagtcgatgacatcatagggcgtcatgccgtagatttcccgggccgcgttccgcgtctcgaccgtgtcgatcaagccgtcgccgtcggcgtcggcgatgtcccagggaacgctgtagaattccatctgccgggtcaccagcgggcagtcgggcccgtagcgcctcaggtattcgaccgtcaagggcaggtagtagcggccgtagctcgcccggacgacggttttcccgtcctcggtcaggctgtaggtcagcccgatccggggcgagaacgtcttgaaatcgaagatgttctcggtgcccttccgggtgcggaggaccgtcggatcgccgatatcctcgggtttggccaggggctggtaaacttcgccttccccgtacttcgccgtcagccggtcatagcggaggccgatattgacggtcaggcgtttggccggcgaccattggtcgtcgaagaagaagcccatcgaatccgccgtcccgaccgtcaggaagggattgatggagtcgcggaggttgtagaaaaccaggccggtgtcgccgtaccagctctgcatgtagttcacattctgcgtccagcggtagggatacaggaagttgacgtagttctggaaataaccgcccaacgagttgctccggccccgggtgaactgggcgccgaacttgatgtcgtgctcgcccagaaagtcctcggcgtagtgcgacacgtcggcctggatcgtctggcggttcgaatgccagccctcgatgtaggggaaagccccgttgatgccgtactgggcccacttccaccagttgatgtagcagggatggtccggggcgtcgtcgggcacgtggggcgtgtcgttcgtccagaatcccaggtacttggccgtcaggatggtcgtgctggacgggagccattgccactgggcggacacggaatggtcgacgctggccacgccgtaggacgcggatgtatcccattccggctggctgccccagcttccgccggtgtagtcattgctctcgtaatggtaggagatccaggcccggtgagcggtgaagggctcggccgagatcttcatgtcggcgtagcggccccagctttcggccaaaagatcccaacgggggcgcttcccggcgttgtagagataatcgattccgccgaagaaccagatcttgtccttgatgatcgggccgccgaacgtcaggttcagctcgtaatcgctcttcggcggtccgccgtaaagggtgacgtcgggggcgacgtagatccagtccgtgccgtacttctcgttcgtcgccggctggttgctcgtccgccacttgacgggttcgaaatagactgccgccgctccgtggaacgagttgcttccggacttggtcaggacgtcgatcgccgcgcccgagtaggatccgtattcggccttggatcccagggccacgacccggacctcctcgacggcgttgtagttgacccggaccagcgttccgaaggaggcgccgcgcggattggtggcgttgacgccgttgacgagaaagacgttctcgttggaggcgccgccgtaggccgtcgggctcggcatccagccgcccgagctgccgtggtcgaacatgccgggcgtcgtcagggacaggtcatagaacgcatcccggctcgtcggcagcttggtaagcatctccgcttggatcttggagtcgatcgtcgacgatttcgagtcgacgatgggcgcggcgcccaccacttcaaccgtctcgttgatgttgcccgtcgggagagccaggttgacgaccagactgctccccgccgagaccatgatgccttcctgaacgatggttttgaaattttccagggacgccgtgatcttgtattcgccgggcggcaaatccaagaaaacaaacgatccccgggcggtggagacggtcgcccgcttccccgagatgagggccgggctggtcacctccacgttgacgccgggcaacgcttcaccggcgtcgtcggtaatcgttcccgagatttttccggtgagaatcgattgaccgcgcgccggcaggctgatcccaacgatcaacaggacgacggccagcaaggccgcccacatgtgttttcgattcctctgcatctcattctcctctttgtgggtttgccttccttcctgtctcttccggttccctcggaagagaccctccccaggtgatctttgtacggcgttcgttatattctcacccccctccggacgcgggcctgctcattcttggcttgtttcatggcagcttcagctcattgttgaggagcagggcggcggcgcctaagatgacgatgtcttccccaagcccggagaccgcgacgacggtttcgtcggccaaggccgagagcgaccgccgtccgatctcccgccgaaccggatcgagcaaggccggcccgagtcgagtcaggctgccggccaggatgaggcgatggacatttaaaatccccacgaggttggccagggcgatgccgaggatgcggccagcctccgcgaccatggatcgaagcgtcccgtcccccgcctccaaggcccgggcgacggcgtcgatatcgatccgctccggcgcgccggcgaaccggtgaagaagggagccgggatcgccggccgcgatcccccgggcggcccggagaatcgactcgcttccgacgaccgtttccaggcagcctcggtggccgcagcggcaggggtcgcccccttcattgatgaccaaatggccaagctcccccgcgccgaaccggtcgccgcagaagagctgccggttgaggacgatccccgccccgatgccctggctggccttgatgacgatcaggttcggctcgtaaccgttgccgttgccgaacgtgaattcggccaaggccgccgcctggcaatcgttggcgatatgaacgggcaggccgtgtttccgagcgagcatctcccccaagcggatttcgcgccaatcgagcttggccgcgtaccgaacgacgccgtgttgggaatcgatcaaacccggggcgccgatcccgataccgagaagagggctggtcgaaagccggcggagacggtcgatcagggcgtcgatcgaagccagcgtgccggaaacgtcaccgccgttgatcggccagttcaagcggtgtttgatttccccccggagattgacgatcgccccccggaattcgttctccgccaggtcgaggccgatcaggcagcgggcctcgtcgacgaacttcaagagaatcgggggtttgccgcttttagacggaccgacgccgacttcggcgatcattccgtcgttttcgagatcggcgacggcgtcggaaaccgtcgcccgggttaatccggtttcccgggcgatcgcggcccggctgatccggtcgtttttatagacagtcttcagaatcagaagacgattgtgactcttggtgtgttgcgaattaacttttttgattggatttcccgttccaacgcatttgtaagtttattgaacttacaaattcaagattacttaaaaaaaatataatgtcaagaggtaaaaatccagggcggacgtcagcatccgcccttgattttttccttgagagtgtggatgagatcatcgatgaatttgattttatccgaatccgtggtcttggctttcgccttttcgagatactccacggccttgacgaaatcgccgccgttgatatagcaccggctgaccatttccaggatttcaggatcgtcgggtttgagggcgagagcatcctcgaaggctttctgggcctcggggacgcgccccaagcggaaaagaatgaggccggaattataggcgctgtcggcgttggtcggatcgagctcctggtttctttgatacgcggcgatcgctttttccggctcgtccagttgcttataacagaggccgagctcgaagaaaaccggcggaaagtcgggggtcttttcagcgacccggccgagcgtctcgaccgcctcggcgaacatctttttccgggcgtagctcagcccgaggaaatagagggcgttgacctcgtccggattcttctccaggaaatcccgaagcaaggtgatcgccccgtcgtaatccttgttgcggatcttctcgactgcttcctggatccgggcctcgtcgatcttgagcctggcggccttgtcgacgagctcctgggagaccagcgtcacatccggaatctcaaccttctgcatcgtgtcctggggattcgggaagcgccactcgtcttccttgaccgcgaatccttccttcttgaaggtcacggtgtagatgccgtggggcaggccggcgaatttgaattccccccggtcgttcgtcttgatggtgtatccccggctcgtcgcgacgtcccggagaaggatttcgaccccggccaccggcttcgtgtccgtgtcgacgactcttccaaaaaagtaatactcccggtactggccgaaggccgagacggttccccaggcgagaacggcggccgccagaaccgctccgaaacaaaacgctcgcttattcatgggctgactcctcctttgacttgaacgcattggctttttcaagggccgcccgcatcttttcgggctgtcctttccggttgaagatatcggcttgcaggaaatatccgaaggccttgagctcgtccgtcgcggccagggagagccccttttccacaaggccggcggcctcgtcgatcgactccggctcgcttaaaagcccccgggccaggaaaaggtacccctcggcctggcgcggggcaatagccacgacctcccgcatctcgtccaaataggcctgtctttcccccagccggaagaagatcttcccccggttgaagcgggcccggtactcttgggggtaggaggcgatctcctcggtgtacgcccttcgggcgtcctcccagcggcccagtccctcgtaaagaagccccaggttgaaattcgcgaagggaaaccgcggattctccgcgatcaccgacttgagcaagggctccgcccgttcgaattgatcgagcccgatcaggcaggccgcgaggttgaggccgttttgagtcagcttgggctggatctcgaaggctttttccaggaacggcagggcctcggcgtgcttctcctccgccatgtagacttcccccaggagcatgtgggcctgaacgcttttctcgtcgaccgccagggtttgtttgcagacggccgcgacttcctccatccggccctcgctcatgaggatgttggccagcgagatcagggcttggatgttttcgggttcggagccgaggatgtggagaagagcctccttggcctcttccatcttgcccgtctccgaccggcaggtggccaggagaagaagggcctgggcgatatccggatcgctccgaagcgtcgcctcgagaagcacggccgcctcgtcgtaccgctcgcccatgatcatctctccggcccgctggacggattcgtaaacgaggagtttgtccttggggtcggccggggctccgcctccggattttttcgaggcgaccggagccccgatatagccgagggcggacagccgggccatcgtctccttgtccaggtcggcggcctgaagcttcggcgcgccgcggcccgattcctcgacgaaccggtccagccgggccttgaaatcgcggacgagggccggattccggccggcgatattcaccgattcggccgggtccttctcaaggtcgtaaagctccaggcgcggagcatcgatgaacttgtaccggacggtccgcagagccttaagcggcgcccagccgaattggatgttcggcgccatggattcgccgtaggcggactcttccttcgcctctttccggccgaacatcagcgggaccaaggaccggccttggcggcccgccggaacggacatcccggccagctccaggatcgtggcgaagacgtcgacggtgctgacctgggacgtcacccggacgccgcggcctttggccaagggcgtcacgacgatcaacgggacgcgctgggcgtagtcgtaaatgaaatacccgtggctgctttcgccgtggctgcccaggccctcgccgtggtcgccgacaaagagaagaatcgtccgccggtccaggccggtgcgctccagccaggacgtcaggcgcccgatctgctcgtccatgaaggcgatctcgccgtcgtagaggccggccggaccgccgggcgcgaaccggctgtaatagggttcgggaggggcataaggcgtgtggggatcgtagaggtggatccaggcgaaaaagggcgtgtccttgcgcccctcgagccaggccaaggcggcgtccatgacctcgttgcccggcctttggaccgctcccaggtcgagctgcttgtacttcttgaggtcgaaccggtcgtcataatgatcgaatccctgtttgagcccccatcggccgtcgaggacaaaggcggcgatgaacgctccgcaggcgtacccgcgggaagccatcacctcggccagtgtcgtctgctcgtcgctcagggcggtgttaccgttcacccgaacgccgtgaaaggtcggcgggaggccggtgaagatggtggagtgggcgggaagggtcaggggggcgacggtggcgcattgctcgaacagcgcgccccggccggccagggcgtccagaacgggcgtgcgggcggcccggcagccgtaggcgccgaggcgatcggcccgggtggtatcgagggtcacgatcacgacattgggcttgtcgacgccgagggacgaccattcccgggcgatccgcgggaaggatccgcggcccgtcagcagatggaaggccaggatcgccgcggctgcggcggcgatcgcgcccgcaaaccacggccagcggcggggcggggcggcggcgttttgttttttcacggcggctcttacctcgttttcagcagggcctcataaacggcccagacggccccgggcctcatgtatttcatggcccggaacaggcggtcgccgtaagtccgggaccggtcgttccagacaagctcggccggattcaaatacgcctcgggcgtcttgaaaaagtatccctggccgtaggggctgtagacgacgtgatagacgccccaagcggtttggaggccctcgtcccgcaacccgtggagaatcaggttcgaggcgaaggcataagcggtccccgcccaaacctcgtcgccctgctggctgaaaagctgggtcccggcggccgtccgtccgttgaccgcgccgagccggccgtttccgaacccgagaacgttcttttcaaagacggtccttagagcccgccggacttgagacgggggaacgatccgtccggcctcgtcgttttccagcccgaccatggccgcgtaccagacgccgaacagctgatcggtcatgatgtcgtcggtctcggcgtcgatgttgaagcagccgctcgattcgttccagagcgtctgcagggcggtccggcccgcctcgaaccaggagcggtaccgggcgacgatctccccgaccggcaggccgtccagcgattccatccccgcccgccggcagtcttcccccaaggcggcggccgcttggagcgaggccagccagagcatcccgacataggccgtctcccctttcatccgccacgtgtcgtacgtctgatcggggatgccttcgtttcgagggagatggctttggggatcgccgaacttcttctccagggtgtcgagggcggagaccgacgcccggaacgatctttttagaagatcctcatcccccggcccgccgtcccggagcgcccgcagggcccggaggggaaatttgggattgaggtccttccaaacgttgccgttctgccagtcgaaggcgttgagaatgacccagggccgtttccgcggcgacccgagatcatggggaaccatgcccgcggccttgttgatgctccagtaataggagagcttgtcgggcggcacctcgccgggaaaagcgctcgcgtactggtacgccttgaaggaggcgtcctccatctccacggcccggctgaaaaagcgcaggttttcccgctcgagcccgggccagagcttaggaacgtgccagcagtaggagtcgacgtcgaacgttccgtacatgagatagtcggcgctctcgagatacgtgtggagattggtcgccgcgtcccacaggctcgtttcgggaaggatgtagagctcgttgatcagggcctgcttgaaccagtccggcaggctccggtcgccgatgatcggccgctgccagtcgtcgacggcccgttcccattcccgccatttgtccagggcttcccgggcgatcgccgccgcttgatttccatccgatccgaaaaaggccgtgtatttcctgaggtggcgcgccccgggctcgaactcggcgtatgggaagtcccaagcgaggacgatcgggaactcgaccttctctccgggccgaagagtcagacggacggccagggcggcgcccaaggcctcgccgccggacgtggtccgcgacgtctccccgccgggaagaatcccggttccggcgaaggacgtccaaacgccggccccgtcggagaggggatcgaaatccgccaggacggacacttcggcccggcccggaagggattcggcggcgacgcacatcgtcccggtgagggcgtttccggtccggggatcggcatccttgcggccgaagacgacgcccgtcatccggccgtcgcggacgacgcggttgacccggccggggatgtcgcgccgccagccgaactccgccgccttcccggggctcttgagccgcggttcccagccgatcatgttttcccaggtcagcatcaccgaaacctcgaccggccgccgggtcgggttttgggcgatccatttgtaaacggcgaccgggtagctcgtttcccggtaattatggggaatgaccggcgaaaactgggtcaccgccagcttggccggaaattcgggattcgtctcgtaggaaaaccccgacttggggaagagggcgaagtagcttcccgcccccgccggatagccccaagcccaggccccgagcgttccgtccgccggagcgccggtcgcaagcgtgcgggcgatcgtcttccccccggatttcatgaacacgtggaaccggtccgcctggaccgtctcgtcgacataccagcccggcttgaggaaccagtagcggaaatttccgctcatcgtccattcgaacgccccggccccgatcccgccggccgggcaggcgctcccctcggcgtcggcgtcgatgtccccgtcggcgatcgtgcgcccgaaggaggaaagacggtagccgacgggccggtcgaaggcgcaggggggaaagccgccgaggttggagggcatatcattgagcgcggccaggacggaggaaagatccccggctcgaagcagctcctccagccgtccctcgatctcccggccggagaaatccaggatccctttttccatcaagagctcggcgtgcccgtcgacgagtttttttctaagcgagacggcgtttccggcctccctcgccgacgccgggacggaaaaaatcaaggcggcggccagggccgccgcggccgtgattctttttttccgctcgaaaagactcatcgtttttccccttcgccgtccggctttctcaaacggacggcggccgctctttttttgaaacgcggctcaaaaaaacttgcagaacgatgatcgccgcgcagttgacgaccggaagaagcagaccccgccgcagcgaagaggatttcgcgatcaacccggccagccaggggccgagcattccgccggagagggcgaccgtgaaaagaatgctgaaggccgtgccggagatcgaggcgaaccgctccccggccgtggccagggtggtcggataaatcgcggcgaagccgagacccaggagcagggcgccggccgccgcccaaacgccggaaggcgcggcgaccaggagcccggccgcggccaggctgaggagggcgctcccgagaacgagcggatggttgccggtcctgccgacgatccggctggccgcgaaacggccggccatgatggccccccaatagccggccaggacgaacgaggccgcggccccggtcaggccgtgtccctcctgaagataagtcgagatccatccaccggccgtgaattcgtttcccgattgaaagaatagaatgaaagcgcagatccagagcagaggatcgccggcgatgagcttggccttccggatggggaatccctgcggctgcttggcctcgggaaagcgcaaggtcagaaacatcaagagggggacaagtcccgcggccgcggccagaaacaggatccggacaaggccgatccccgccaagagggttccgatcaaaaacgggatcgtcagggccccgaagccgaaaaagatcccgagcaggttcagggcggagccttgtccgccgggatgaaggtcgttgatcaaggcgttggttccgccgttcaatccccctcccccaagccccaggacgacgacggccaggacgatcaggccgtaggtcggggcgacggccagcaggccgaaagacagggcgacgagcagggccgacgccgccaggaaatatttgaatccgaagcggtcgacgaccgggccgaaaaagaacgagacgacgagcatggcgaagttcataagaaggaaaagcccgccggcctcggccttgtcgatccggagccgttcgaacagcgagggaaggatggcccccaggacggccatgacgatcccgaagacgaagatcccggcgaaggccgaggcttgaagacggacgacgctcaccggccgctgctgcggggcggaggtcatacgccctccttcttcatggaccgggcgtagtagaactccgtgaacgcctggtagacccgggccatgtgtccgggcggaacgccggggacgttgggggagacgaacgtcggggggactccgcccgtctcggcgagccgggcggccgtttcggccaccagcgacatggccacgacgacggccgcgaccgtcgatccggctgcgacccgctccgtctggccgacgtcgaccagggcgtcttccggcgggacgcagttgtcgatggcgatgtcggagacctcggccagggctttgcccgaggaatggctccgccgggcgatcttgaggttggcgtgggaggagaccgagacgaccttgagtcccttggccttggcctcgagggcgacgtcgatgggggcggcgttgagcccgccgtgggaaaagacaagcatgacgtcccggagctcgagcgggtagctctggaggaagatcttggcatagccttcctgccgctcgatccaaaggagctcgcgggctccgcccggcccgatgacgttcgtccacatcagccgggggtcatagagagggaagaaaccgacgaagccgccgtagcggggaaagatgtcgagcaccgggatcaccgaatgcccgctgccgaacatgtagacgcgcccgccccggcggatggaagcggccatcgccgcggccgcctctccgatgcggcccgtctcccgggttttgatctcggcgaggatttccccgattttttccagataccgcgtggacgacatgattattctcctttcgagagatcccaagccagcttgccgcagccgtacagcccggcgtcctcgccgagcgtcgaaaccgcgacctcgaggtccttggccgcgagcggctgggcccatttcttgatctccttccggatgggctccaggaggagatccgcggcctggaacaggccgccgccgagaacgatgactttgggattgagaaggctgacgatgttggcgatccccatggccagggtggaggccgtttcggccatgatcgcccgggccggagggtcgttgagccgggcggcggcggccacggtctcggccgttacgtcggcgatccggccgccggccaggcggatcatctccgaggacacgcccgactccaggaggcggcgggcccggcggcccacgccggtccccgaagcttcggcctcgaagcaccccatttccgcgtattcctcccggaactccggccggagggcgaaccaccccacggcgccggagatatcctcggccccgcggatcagccgcccgccggagatgatgcccgccccgatgccggtcccgacggccaggaagacggcgtcccgggcgccccgggccgccccgcgccaagcttcgccggagacatacgccgcccggtcgctttcgatcagaaccggaaaggggaccgcgccttccagcctcccttggagagggaaatggatccagccggggacgttgggcgcccagacgaggccgtcggcttgatacacgatccccgggacacagaccgccgcggccttcacccggccgcccgcccggacggcctcctccccaagctcccggaggacgcgggcgacctggccggccgccgcctcgccgcttccccgatcgaggggctgcttggcccgggcgaacatccggccgccggaatcaaacaaggccgtggagaccttggtcccgccgacatcgacgccggcggcgaagagcgggccttcaccggccgtcatctcccgctttttagcctttctcatttcttgttttcgaaaacaaccgtccaaacgccgccgggcgccatctctttttcgacgacgacggtttcgccgtcccgtcggaacgcctcggccttgccggattcgaggtcgcgcacggcgggatccttcgggaacccgggaagagcaaaggaagccttcgtcttccgctcgccccggttgaaagcgatcaggatccgaaaatccgccccctcgagaatccgtccctcgaccagggcgtccggatccggaatcgaaacctcgaccggcttccgcactccagcccagtccgccaggccggcgaagaatttcccgttggccgggttcttgaaatgatggtaggcggatcccgggaaggatccgacgagaacggctttcccccggccgaacgaggaggcgaccatcgccggcttgccgtcggcgaacgtcgccaggacccggctccggggtccgaagacgtccagggcttcctcgaaaaagacggcgtccagcgcgtccctgggcttgaggagcggcagggcctcgtcggccgcggcgatcgtcaccgcggaggttttggccagcggcaggagctcggtttcccggcagccgaacacctcgtccaagccgccgccggggatgacggggctggaaaagccgcgctcgtcgacccagccgcagcgggcctcggcgacgagcgtcccgccgtcccggacgtattcgatgagccgcccgacatgctcccgcgacatcatgaccggataagggacgatcaggagcttgtagcgcttccaccgttcaggcgcgagatcgcggacgtggaggaagtcgaccgggacatgccgctcataaaaagcccggtggacgccttgaagggactcgctgagcgtgttgtatccgacggcttgaccttcgccggtgaacgactgctggccgccgaccatgtgcgacaacggattgtagacgaccgcgatctcggccggggccggcaggctcttcaaaaagagatccttgtgggccgtgacaacgccggcgatgcggccggcctcgacggcccgctcggtgacctttccatcgagctcgaccagtccgtagccgccgccctcgtagccggagctcatggggtagtaggcgtagatgttgacggcccgggcgccgtaggcgatcgtgctccacatccagtcgcgcaagtccgccccgacgaccgggacgctcatcttcatcccgaacacgccgtagccggcctgcagctcgccgacgtagaatccgccgtttcggagggccatcgagcggacgaaatcgagccccgcggcccggtagaacggcggccagggccgcagggtccaggcgtgcttgggatagatcgacgtcccgtaataatcgacgctgtcggacatcttccggtcgtcgggcgtcccggaccaatccggccggctgaacaggccgggcgtggccgagtggctcgtcaccacgctctcggggatcacggctttgacggcctcggctttaagcttgaggtcggcggccagcttgtccgagatgaattccttccagtcgatgtaatccgtgtacgtgaggatcgttccgaagcgcggcggctcgacctccgcccagtcgcggaacgtccggtaccaggccttgttcaagccgtcgatcgtcccgtagcgggccttgagccattcgcggaaccgggcttgggtcgccgcgcagtagcagaactggacgtgttcgagatttccgacgtaatacacctcggcccaattgatgatgtgcggctcgctccagaggtcccagccgtagaaggcgggtttccccttgacggccttggccgcctcggtgaagaaccgcaggatcttctcccggacgccgggatggtcgaagcagaagcccggggccgcctgggactggacggccaccccgttggaggaaacgaaccgggcttcggggaaccggcgcccgacccagtccggggcggagtcgatatagacttggacgacgacccggagccccatttccccggccaggtcgacgacggtcttcaaggcgctgaaatcgtaccggccctcgtccttttcacaggccgtccactcgatccacgtccggaccgtgttgaagccgaggtccttgatctgccgcaggtccttgcgccaggccgcggccgaatcgggggcgacggtctccagcatcggggcccgggctttgcccccggcgtaccagacggacatgggaaagaaatccttgtttttttcgtcggcgaatccggtcgcggcggccgcggccaaaaccgctcccgcggccagaatcaagagggggattcttttagaaacgttcggcatgccggctctccttgtcctccccccgccgggggagcttggttcgatggaggaaaaagtctccgaccgcctcgagcaggacggattgtccgcgccagcggtcgtggctgagctcccagatgatgaagccggccaccccgttgttcagggcataccggcacttgctccgaaccgagaggacgtcctcgtaggagacgatcgctcctccgccggggctctgaagcaaaggaacccgggcgcaaacgtcccgggaggacgtccagccgttcgccaggcggttttggacctcggtgaagctcacttccccgctcgtttgaaagggcaagcccagggccgggcaatcaaacgagcgtccgtaaaaggggattccgagaaggatcttggacaccgggattccgcggcttcgggcgtaacaaaacgtctcatccacggatccgcaggaatcgccgcaggcgtaaagcggggcgttgtggccggaatgatccgaccacccgccgtgaaaatcataggtcatgaagccgatgaagtcaaagcacggatggagaatttcgaaatcgatccagcggccgtaatacgccccggccggggcggccatggacaattgacggggcggatccatcgccttcagggccgcgtccaattcccggatcagggaggtgaagcttgcgcgctcctcctcggtgtcgacgaattcccagtcgacgtcgaggccgtcataattccaattccggcaggcctccgccgcctggcggacgaacttcccccgcttggcgggatcggcggccatgggagcgaagccgtcgcagttgccccagccgcccaggctcatcaggaccttaaccccatgggcatgggcttcctggttcagctccggatagaggtatccctcgggcaagacgagatttccctccttgtccggccaggcgaaggaatgggcgatatgggtcaaatggacgtaggagatcatcgcatgatcgacgacgtcccgtttccaagcggcgaagtacccgacgacaacgccctcgcgggcggcggccggggaccgcccggcaggggcgtcggcggcccggccggccccgactccgaaagtcaacaggagaccggcgcatatcatccggatgctgcttcgtttcatgcgggacatgagaatatactccgcctcccgggtttatttcaatgcggccccggcttctctccttcctttccggcaagcagccggacgaatttttgcttttccggagaagcggccagggcgtcccagttccagaaaacgacgccccgggacggcggtttcaaggcctcgttcagggcggccttgaattccccggccgacacctcccgctccgtataagcatggccgacctggatgctgggaaggacggccgcgccggtccgggaagacaactcctcgacgacggaatggacccaggccggcgtttgcccgaccatgtggtgatagcacatcggcgacaaaaaatcagccgccgccgccagccggatcggatcctgcccggccacggcccgggccgctccgccgaagtcttccgccctccagggaacgaggtgaacgttgatcttgatccccggcttgacttggcgggcggccgcggccaggtcccgcgcccaatcggcgatcacccggcacttccagtccgtccattccgccgggtgatgatcgagaatccagcgggcgacggccggagtccccgcgagcgtgtccggccagacgatccccgtcgtcgttcgaaagctttccaggcacgacgggcagaagcaggtccggggcagggattccaacgtccggccgggcaggaccatctcccagaaaacaaaaaagcggatgaaatcgaggctgacgacgtccgggtcatgttcccggacgatccggcggagatgttcgatccggcggtccttgtattccttccgggtcggacagacgaattggacccattcctcgcgggccgactccccccggtccgtgaccgcggccaggtccggccgttcctgaagctcctcgggattctgaaaaaccgggaaaatgacgtacagggtgatgccgttggcccgggcgccggtccggaagaccggatcggccagaagggcttccccgacaaacgcggtgttgatccccagctccttccattccgcgaagagacggtcgaagccgccccggttctcgtagatcttcacgccgatgatcggccgggacgcgttcatttccctcttcccggcggccggcgaaccggcccggagacaaatgaaagatatcaataaagaaagaatgagagccgccggccgtcttattcttttcgacttcatggttcctccatcgggacgatgtcccgcaaagggaaatccgccgcgataacgccgccctcccgccggacaagattccggaacgctttgcccctcagccggcgaaacacatggagattcttccgctgcggcgtgcccgttggacaccccgtttgaaacatcgccgcccgcaggacaacgcttctccttgataaagcgggggtctcctcaattcgatagaatcgtctcctcccgacgaaaagtcaaggacggcggccctccggagaagacgtccggatgaagaaggcctcccggcctatcgaagatcaaggatgatttcttttgtcaatttgaacggccccgggaaatggcctatactcgggccggaccgcgcggaggaatcatgaagagacgcaaattcctcgctcaggcttggccggccgcgctggcggccgcgccgccggttttcggcgcgctccgcgccggacgtcccgcgcgcgcccgatccgaaaagatgagcccccggacggaagacgtgaagcgggccatgctggccatgcagcgcgacgcctgggaacagggcacggccgcccaagccctccttgaaatgggcgagacggaagaagtgatcctgatggccaaggaagccgccgtccggcaaaccccggacggccgcctggccgtcctcagttgtttcgggggagtcaccgatccggcggccaacggagaagcgatgctcttcgccgcccggaagacgggggatccgcggcttttccaagcggccgaaaaaatgctctcctacctgctcgaacgggcgccccgccgggcggacgggacgctctaccacgtctccgacaagaagcaggtctggatcgattcgctgtacatggcccctccgtttctcgccgtcgccggacggccggacgaagccgtccgccaggtggaggggatccgccgggttctctggaatcccgaggccggcctcttttcccagatctgggacgacgaccggggggaattcgagagaaaggatttctggggtgtgggcaacggctgggccgcggccgggatgacccgggtcatccgggcgcttccggaaaccatgaccggagaaaagaaagccctggccggacacgtccgggaggtgatcgacggctgcctcaggcggcagcgggacgacgggctgttccacgatgtcctcgaccgcccggacacgttcgtcgaaacgaacctggcccagatgctcgcctattccatctaccgggggatcgccggcggctggctcgatccggctcttcaaaagccggccgaccggatgcgggaagcggcccgcggaaaagtcgacgcgttcggcttggtccagggcgtctgcggctcccccgagttcaactccgccggaacagcgaccgaaggccaggccttttttctcctgatggagacggccgcggccgatctggcggattcccgctgattcaaaggaagggagaggagaaacccatgatgaaaacgacggccggcttgcggacgccgttgatcctggcggcgcttttcttgatcgccggaggcggggagggattcgggtcggccgccatccccggcgaggatctccgggccgggaaaaatttcctgccgacgccggtcacgacggaaaaggaggacgcggacgtcctggccctcttttccggcctgcgggtcgccgacgtggccgacggaatggacgccgccggccttcagaacatcgggctgatggatccctcgatccatcctctctggcgcgatacggaacacttcacccaccggttcgccgggatcgccgtcaccgcccgctatgtccccacccagagcccgccggccgggaagcgggaggccgcggactatgacgcctgggccggggactggtacgaccgccgctccggcgagcccttcgccgacctgatccgcggggggacggccctggtgatcgaggacgccccggcggccgatgtcggctcgatcggatcctacaacatcttggaatggaaaagccgcggctgcgtgggcgtcgtcacgagcgccgcggcccgcgacaccgacgagatcacggccgagcgcgtccccctttatttccaacggccgggacgcgggatccggccggggcgaaacgagatcgagtcggtgaaccggccgatcgtctgcggcggcgtcctggtccggccgggcgacatcattgtcgccgacggggacggggtcatcgtcgttccccgggccgccgcggccgaggtcgccgcctacgcccggaaaatcctggacggggacaaggaaggacggcgggatctctataaaaagctcggccttcagccggatgattcgatcaaaaaaccgccccggtgagcggatcccggccggcggaccgaagggagaaggcggatgacgcgtctccggcggcggatcgtttcggccctggttcttctggggctggcggcggtgccggccccggcccggccgcaggacaaaacggccggccttttccagaaggggatcgccttcaccggttacgcgaaggatgcctacgacggcggaggtgcccgccaagccctgcgggagctggcggcggcgaacgccgaatgggtccagatcctggtcaccggataccaggccacgcgccggtcgacggtcatcgaccggacgggagaggaaacccccgccgacgcttccctggccgcaatcatcggcttcgccaaggagctcggcctcaaggtttttctcaagccgcacatcgacctgcgggaagagcccgccgggtggcggggcgagatcggccaaggattcaccgaggcggactgggccgcctggttcgcctcgtaccgggaattcatcgtccactacgcggcgatggccgaagctctcggcgcggagatgttcagcgccggctgcgagctggaccggaccgtcggccgggaagcggattggcgggcgacgatcgccgccgtccgggccgcctaccgcggccttttgacgtacgcggacgaccaggccgaaagcgatcccgaggccgtccgctggtgggacgccgtggatctcatcggcctggacgcgtacccgaccttgaccgacaacccgcatccctccgtgcgggattttcgggccggatggaaccgctatcttcaatcgcttcacgaaatttccaggcgatgggggaaaaacatcgtcgtgaccgagatcggctaccggagcatccagggcggggcccaggatccttggaactggcagaaggagggcccggtggatctcgaggtccaggccaacgcctaccaggccggcctgcaggccttgctcggccgcggctggattcagggcgtctactggtggcagtggatgccggacccggaaaacggcggaccgaaagacacgggctacagcccccacggcaagccggcggagcgggttctggcggcgttttaccgggacgcggctccggttcaccctaatttctgaatttccgggagggcgcgggccgagagagagccgtgccccgtttttcacccgggacggcgccacccggcggcgggaaggaggcaaaatgaaagcgacggcgatcgggcttgcggccttggttctctgggcggtctccccttccatttccccggcggacgcggacgcgggaggatctccctggattctcactcccgaggaatacctggattccccgggagtctccgtcctggtcttccacgacatttatccggaaggcaagcagggcggagtggaaatcatccagcacggcgaacgggtggcggccgtgggagacgtccgcctcgaagaaacgccgggacaatggagccggcggcccgaaacgggcaagcgggagatcgaccgggagcggtgttcgatccgggtgccggccgctttcgccgggtccggcccggcctatgccgtgcgggtcgagccggcgggtcccgggttccgcgtcgccgtcgatctggacaaaccgctgccggccgccctcgagggccgggtcagcttcaacctggagcttttcccgtcggcttatatcgggaaaacctatcatctcggccggaccgcggccgtttttccccggcagggaaacggtcccatgatcccgggcggattcgggacggtccggccggccgccctggcctccggtccgaaactgtcgctcgcccccgaggatcccctccggatgatgaccatcgaatcgacgggcgcggacatcgagctctatgacggccgcaacacggccgataacggctggttcgtcctccgcgccctcctccgttccggttgcacgcggaacgcggccgagtggatcatcacgccccaccggatccccggctggattcgggatccggtcatcgccgtttcccaggccggctaccatcccgaccaggagaaacgggcggtgatcgagctcgaccggaacgccggcccgccgggggaagccgtcctgtgccggatcgaggcgggaggcgggccggccgaagtcctccgcgggccggtcgtcccctggaacgggagattcctccgctacgattacgcgacgttcgacttcaccggggttcgggatcccgggatgtacgtcctgaaatacggatcccggtccgggccgccgttccggatcggccgggacgtctatcgccgggacgtctggcagccgacgctcgagacctaccttcccgtccagatgtgccacgtggaggtccgggacgtcgatcgcatatggcacggggcctgtcacttggacgatgccgtccaggcgccgccgtcgacggttcatttcgacagctacgagcagggacccgtcctgccgtacgctttcccggcgcgcggccgcatcccccatctcgaccggggcggctggcacgacgccggggacttcgacttggccgccggctctcaagcgttcgtgacctggatgctcgttctgatccgggagacgttcggcctggcgaccgaccagacgacggtccgtccggacgagcgcctcgtccttctccaccggccggacgggattcccgacatccttcagcaaatcaggcacggggctgagaacctgctctcgggctaccgggcggccggacacagctttggcggaatcatcgagggctcgatcatccaatacagcctgatcggggacaccgcctcgatgacggacaaccggatttacgatccctccctcggccggaccgaagccagggaagggcgctcggggcggccggacgaccggtgggccttcacggatccggacacgtcgttggagtatcaagtcgccgccgccctggcggccgcctcccgcggccttcgggagatcgatgccggcctcgcccgggagtgcttggaaacggctctcctggcctgggaccgggaacaaggccggacgccggtctcggcccgggccgcctacatccccggccgcccggaagtccaggaaatcctggcctcggtcgagctcctgttgaccacaaaggaggaacggttccgacggcggctggaagccctgggtcccgtgatcgaggcgaacatcgccgagaccggctgggccgtcgcccgggcctttcccctgctcggggaggggccgctccgtgaacggacggcgcgggctttggagaaatactcggcggacaccgcccgcgagctcgccgccaatcccttcggcgtcctctggcggccgcggatctggggcgtgggctgggatttgcaggaattcgccgtccagcgatattttttgaatcaggcgtttcccaagctcttcgaccgcgagggaatcttccgcgtccttcattttattttaggctgccatcccggctcgaacgtctcgttcgtctcgggcgtcggggccaagtccctgacgatcggctacggaatgaaccgggccgactggtcgtacatcccggggatgaacgtttccgggacggccctcatccggccggatttcccggagctcaaggacgattttccgtttctctggcagcaggccgaaaacgtcatcggcggagcggcgacgtacatcttcaccgttctggccgcggaccgtctgctcaacggtccggaggaaaacaaatagggagacacggcacctgtttaatgtcttgacggcgggccgcgtcacggcttatcctcaccgcgtctaaggaggtcgaacatgccccggtttcagcctttcgtgatggaacggatgatgtccaaattcgagaaagcggtcgactataacctctccgagagcggcgtccacccgttgaccctgaaggagctcttccaggacgacccggagggaatggcccgtctgatgtcgctcgaaatggactacgcccacgccaacggcattcccgagctgcggcggaacatcgccgctctctatcccggcgccgggccggaaaacgtcctcgtgaccgtgggagccatcgaggctaattacgacatcctctggagcctgctttcacccggcgacgagatcgtcgtcatgctgcccaactacatgcaaatctgggggctggccaagaacctgggattctccctcaaaaccttttccttggacgaaaaaaacggctgggcacccgacctcgacggcttgaaaaaggccgtgacccggaagacgaaattgatcgccgtctgcaatcccaacaatccgaccggctatatcctcgataaaaaagagatggaagccgtcgtcgaaacggcccggggcgcgggcgcctggatcctggccgacgaggtctacgccggagccgagcggacggccgaagaacaaacgcccaccttctacggcttatacgacaaggtcctggccgtgggcagcctgagcaaggcctacggcctgccgggccttcgggtcggctgggccgtcggcccggccgaaatcatcgacgagctttgggcccggcacgagtacttgaccctaagcgcgacgatgctttccaatcacctggccgcctacgccctctcccccgccgtccggccccgcctcatcaatcggggccggggcttcatccgccggggctatcccgtcctggagcggtggatgggcgaacacgaggggatcctgtcggccgtgcctccgcgggcggcggccatcgctttcgtgaaatataatttggatattccctcgacgcgattcgtcgagcggctgcgcgaggagaaaaaggttctcatcgtgccgggcgaccacttcggcctggatcatttcgtccgcatcagctacggcctgccccacgagtacctgacgccggccctggggcgcatccacgaattgatcgcggaaacgggcgcgatcaaacgatagaaggcgcatggcggcgccggctgctctccctggaggctccgtgaaaatcgctcttctggccgagatcaagaacgtccttccgcggatcgatcttctcccggccatcgaggaagggttcgccgcctattccgagggccgggcggttgttccgcccgtcggcgagctgatcctggacaagggcgaagtccatatcaagtacggcgccatcgccggcgaggacttctacgtgatcaagatcgcctcgggcttctacggcaatcccgccttgggcctgccgtcgggcaacggctgcctgctcgtcttcgagcagaaaaccggcgtcccggccgccgtcttgctcgacgagggatatctgaccgacatccggaccgcggcggccggagcggtcgcggccaagtactgcgctccgcggacggtcgagcgcatcggcgtcgccggcgccggggttcaaggccggctgcagctcgaatggctcaaacgcgtcaccgactgccgggacgcgctggtttggggaccgcttcccgacgagctcgagggctatcggagggagatgaaatcgcgcggtttttcggtggagacgacccgggaagcggccgcgatcttgcggacctgcaacctgatcgtcaccgcgacgccgtcgaagacgccgcttctttctgcggccgacctccggccggggacgcacatcaccgccgtcggctcggacacgccggacaaacaggagctcgactccgaaatcctcgcccgggccgacgtcgtggtggccgacagcctggtccaatgccggctccggggcgagatccacaaggctctggcggcgggaaaaatcgacgaaagccgggtcgtcgagctcgggaatatcatcagcggccgggcctcggggcggacatcggacagccaaatcaccgtcgccgacctcaccggagtggccgtccaggatatcaagatcgcctcggccgtttatcgcgccctcgccccctgattcttcttggccgcggcctcgcctttcgcgccgacgggggttattcaatatcctctttgagaaccgccgcctcgttgcgctcctcgtctttggctccaaaaagaagcgtgacggacttgtgcttttcggccgcgcttctcaattcctcaaacgccggatttttcgacagctcccggcggtatctctttttaaactccgtccattttttcgggtcgtggccaaaccattgccgcaattccgttgacggcgcgacctccttcagccacaagtccagccgcgcccgctcctttgaaatgccccgcggccaaagacggtccaccagcactcggaagccgtcggctttctccggtttttcgtaaattcgtttgagtttgattattgtcttcgtcatgggttaattttactccataaccgcccgctcggctcgtttccgcgcgcccgccgaagcttcggccgcttgcgcacgcggagcgttcgcttgctcgcgaaaagagaatattttatcggtaatttcctcttattttttcgctggcggcaatggaatttgccgttttgcaggcgtttttggctccgagaaatgaaacgccgcctccgcccatccgcagttcaaacggttatttagggggatttcaagtgccggggacgggaatcgaacccgtacgaggctttcgccccaagggattttaagtcccttgcgtctgccagttccgccaccccggcggccaaacgggcggccggtctcaactatatccaagttggagatttttctcaattgacattgggcgatgttctttgccgttttaattcaaccctaataatataatatgcatcgttgcatgtgaaaccacggctgactcaaaactgtatttactataaatccagccagtcaacgttgcagctgaaaaattcattattccaagataaatagtcagtatttggttcccctcaatgagatttaagtgaaaaagcattaaaaatatgagactacttaagactatagaaagacacctgtttttaataagtagaagtatacctgtcattacaaatagatgagagacggtctcagttactattgcagcccagggagttgttaatatgcgttcaattaatgttcccgggttcttgggaaccgaaaaatattgattgaatgcgcaagtaattatggcaaaaataatgctaaaaagcattggtttaagcagaattctgaaatcatttatttttatcttttgcccagattcccacttatttaaaattggcatttctagtgttgatttatcagcaaatcttaatccaagccatccaaaaagcagaacgcccaatgttgatcctattggaaataaaagccaaattatgcttgtaatacgatcattggaagcttttataaaaggaatgtataaaaatccagaaattagtgttgaaagggtgagaagtattaatctttttttcattatcgatacccccttattgtacgctgacgttgggctatttcaatattactataaaacataattcggcggcatctttgagggttgctttatctggattttgaaaagctattggtagttggatgacttgattttctatcaacaaatccatttagtcaaactaacttggccgtgtcaacggatgtttgcattttgggggctatcttagtaaaaatcctcctctcgagatttggcgatcaagagagtttacgatggcctccctcctattccaaattgcaaacatcactgtacactgtcaatattcaggcattaaacaacagaacacataaaaagagaaacttattggtttctaaatactttcaaggcaaaataaataaaagccctaatcgtccgggtcggattttaagtcacttgcgtctgccagttccgccaccccggcggccaaacgggcggccggtctcaactatatccacgttgaggatttttctcaatcgccgggcggcatcctctcgattcgattctgttcaatcatggcctgattcacgatttttctatttccaggcggcgggatctccgccggtccccgcgtttatcccgtgtccagcggcgcgataatctacgagcggatcggcgtatagatttacgagctaaggcaccggcgaagccggcccgggataattcctggaaaatgggagatatggcatccttctctttcgaccgcgagatggagaggagagagggatgtcacagacgaggctcacgcccgccgactcggacttcatcatgaagctcaacgaagtgggatattccaactcggagatcgcccgcaagcttggggtgacagaaggagccattcggtaccggatcaaccggcaggattcgggcgagccggacgggaggacgagcaagccctcgagcctggacactttccgggagtggatcagcgtctggatcgaggactatgaagacagccggcggaggccgacgcttcggctcctcgagcagatgttgcgggaacatcacggctatggccgttcctatgacgcgttgcggcggtatatccggaagcggtttccagattttcacaagaagggggcgcggtgccggttggaaacgccgcccgggaagcttctgttcgtcgactggaaagaggatcttcacgtccaactgggagctccggaggcttgggcgtccgtccaggcgctctgtttcgtcctgggcttcagccggaaaatggcagtctggttttcgtttcgcaaggacctggagagtttcctggctgggcatcaggaagcgttccgggattacggaggacttcccgaggccatccggcccgactgcctgcgctcggcggtccgggtctggcgcggcgccgcctccaccctcaacgagcgataccggaagtaccttgagcctctgggtgtcatcgtgcttccagccaggcccggggctccggaggacaagggaaaaatcgagaagaggatcctggacgtgttctcccgcctggatctccgccatcgcgtctaccgcgacctggacgatctgacgagccgggcccgggcgatcctggaggatgccgagacgacgtggcgctcgggggcgacgggcttttcggtggcccggagcttcacctatgaaaagccgtaccttaaaccgctgccgctccattttccagcgctcccggtcaaggagtcgcggaccagagtcaggcgggacggcacggtctttttcgacggcaactactaccaggtgccgggcggttaccgggaccggtcggtcttctgccggcatactggccaggagatcctcatcgatcatgagggagcggagatcgggcgctttgcagctctgcctcaggccaaggggatggtcaggctgtcgatcccggcactcgaggaccccaaactccatctcagtgagcggatccggatgtggggtctcgaggtcgcccgccgccaggtccagatctatcaggagatgagccgatgagtctgaccggaatcgagcggaacatggagatgctgaagctcgtccacacccgctcctgcgtggccgagctgctcgaggaggcgtctcgggaaaagcacggcccgatggagtttttcgacaagctcctggcgatggaggtcgaggcccgggaagaacggcgtattgccgcctcgttgaaggtctcggggctgccgcgggggatgcggctcgagtcgttcgatttcctcttccagccggcggtcgaaaagtcacgggtggacttcctggggagctgcgattacatccggcgggcggagaacgttctattgttcgggccgcccggggtgggcaagtcacatctggcggtggggcttggagttcgggcggtcgagcacggcttcagcgtcatctattacacggtcgaagagctgcttcagcagctgaagcgacgggcggatatcccggtggcgaagcagcgcggccgggcgtatgtgaaaagcagcttggtcgtggtcgacgagctcggctatcagagcctcgaccgcgcggaaacgcacctgttcttccagttcgtttcggcccggtacatgaaaggctcgacgatcatcacctccaaccggtcggtcaaggactgggtccagatcttcgccggcgacgagatggcggcgacggcggttctcgatcgactcttccacaaggctcatatcttcaatatcgacgggcacagctatcgactgaaagacttcaaccaaaccatgaagggagctcacctggaatgaatcgtcccgttgttcctcgagaggccctcgtaaatctacacgccgatttatctcgtaaatctatgcgcctattgacaatcccggccgcatccgaccgaagcagcccgaggaggcgccgcctctcaccgttccagggatcggcccatgcccctaaaagggacaaagaagattgggtcttcctatttgtattcgaaccgcgcttccttgttccgcttgctccagaaggagcggtagatcggaccgggcttaatcttcaccggaaggttctcgattcgctccagccattcggccgtcttccgctcggcttcagcgaacgcccgctcggtgaaggccgcccgctcccccgccgcggccggaaggcgtccggcttcctcgaggatctccttctcccaggcatcccgctctccgcggaaaacggccagccggcggctgaaatcgcggagcaccgtccggtggaagcgttcgtggcgccaccagagcgttcccgcgtcgaacgttccggacaacccggggcccaaatccggcagcatcccatcgccgagccaaaccggtttgaaaagcgacgtgcaaggagcggccgttcccgtcgcccacaccgcccgccgcttcggttccctcgccaggcaagcggccagggcggccgtcgtctgggtcgccttgcgggtcaatccgttggccgcgtgggcgcagacgcggttcccaaggaaatggccgtccggccggtaatcatctccgtcatgatcgcgtaaaacggccatggccgcggccgcgtccatcgatccgcgtcgtccctcgaccaaggccaaggacctcgcccggcgccggcggcaggcggagaatttggtatagaaccagtcggaatagcaacgggcgaaatggaacgccccccccttcttcaaccagcccttggcccgggccgtggcgatgagatcgggatgcatccggtcgatctcctcgccgagcgtcaggccgttgctgatggacgccgccctttcgaccttgcgcgccgcccacagcgggccggccgtctccagcacccaggcttcaccaggatcggcgatgatgaagctgttgtgataggtcatcttccggtcgcgaaagccgcagatccccccctggccgtaatcgtggagaaggccggcgatgagttcgagagcctgcccggccgtcgaggcccgctccaaagccaggcggagcatgtccatgccgaggagaccgggcttgagggaaagcggcatcttcgtccagacggcctcgttgccgatggccaagccgtcttcattgacgccgatttccgccccccacatccagaacggacgtgagatcaggacggcccgcgtctcccggacctgggggatcacgagatacgtcagccggagctccgctccttcctcccatcgccggcggggatggaattccagcgcctgggcctcgttcggctcgcggtcgctgttttttccgaagatcgtcacccctcccgccgccgcttctccccgggccacgaacgtatcgcacattttccgttttctcctttctcccttctattttatccgagaaacgggaagacacaataccgataaactctatttcggcggccgatcgggacccgtttcgaaatcggtgcctgttcaaccatttcctcatttccctgccccgcacatccgcgccggccggccgcggcggagaaacgcacgcgggcgccgggagtggacaaggaaagggaaacagcccacgcgcttgaacatcaaggaacggccgcttcacaaacagcgggagaaagccgaatggcgggaaaaactatatttcacggccggttcagccgttttttcctctttcagcggtaaatcggtgcctgtttaaccatttccgtatttcgcagtcctggaaatcctcaacgccggaccacggctgaaaaaacacgtgcggacacggtgagtcaaaagaggaaggagaacaaaaccctctcgatgaacatcgaggcaaagccgttccggttttttcctctttccgcggagacgaacggcccaattcctcgcggcaacggcctcgagacgatttcttgatgatcagaacgcgatcgatctttgagaaccggacgttttatgaatacggaaatggataaccaggttccgaattaacaggttctgaattaaaaacgcccggggcgcaaccgcgccccgggcgttcccccatcactgaccggggaggtcagaagacatccacccggaccccgaattcgaagaaccgggcccgccaggggaaaatgggttcggtgtagatgtaatcgtcgaaaaggttggttgccttgacgaatatctcgaaccggccgaagtcgtacgccaggaccgcgtcgaggttgaaatacgcggggatctcgtaattcttcttcgccgagaattcgtaccaatcggatttcgaagcagccaggccgaagagactgatccgcaggccgccggccgggaacaccgtaaggtcgaagttcaagttgctggccggcatcgcgtccagcggccggtcgtccgtgtcgttggcggcgtcgatataggtgtagttcagcgtcccctcgagccagccgagcgacttcgacgcctgcagctcaaatccgttgatgtgggccttgccgacattccagtagcgcttcttcccgtcggacaaggtgatcgaatcgatcatgttcttgaactcgtacatgaaggccgcgcccgacaggcggacgcccggatcccaggtgaatccgagctccacgttcgtccccgtctcgctcagaagatccgggttcccgctggagggcgagtacatcgaccgcatgttggggaagcgggacttccgcgcaagcgagaggtgcaggtccagcgtttcggccggggtgaatttcaggccgatcatcggattgacccgggaatacgttccgccggagtacttgtcgatgaggtcgaagctgaggccgccgaccacctgccacttgtcgccgagcgagacctggtcttccagggccgcggaaaacgtcccctggtcgtactcgtcgaacgggagaccgatatcgtcctgggtccgggccacgtccctctgaaaattcaggctggctttcagcgtgttccaagaggcgagcttgaattcggacatggcgaacgcgccgtaaacgtagttgtcgaacgtgctctcgaactgccgcttggccatttccttatccttgaactggtccatcgtgttgcggtagttcacgtaaaacgcccggaagcggagaacggcgccctcgccgagcgaggtgaagcctccggcgttcagcgtgtaccggtcccagttcttgaaataccagtaccgggctttctggacacccagggtcgggggcatgccgtaattcgattggtagattccgccgttgatcatgatctcggaatcgtccgagggggcgtagtaggccttggcgttgagattgaagcgctcgtaatccgtgttcatcaagtcggttctttccccggtgtccgggtccggataaccgaagccgtccgaattctgccaagagacgtcgccgaccagcgagaaccggttccaccggaagccgccgtcgaagccggcgctgtaggtcttctgggcgcccaggctgccctggacggccaggaagggattgtctccgggacgccgggtgatgacgttgacgatgccggccagcgtgttcggcccgtacaggacggaggacgggcccttggtgatctggatcgattcgagcccggcggccgaaaccgtcttgagatcgaacgatccgtagtacggctcatagctgggaatgccgtcgatgagcaggacgatccggcgcgagtccatgccccgcagcttgagcgtcgcctcgcgcttgctgccggtcgtgatgttcacgcccggggcgtactgcacggcctcgctgagatcgcggggcgcgtactgctcaatcagggacgcggcgatggtcgtcaccgtcgaaacgggctggaccttgggggccttgcccacgacctggatttcctcggtgattttggccgcctgatcttcctcggccgccgtcgttgcttcctcgtccgcgcgcaggaaggcgggcgccgtcaggagtccgaaagccagggcgcagaccgtccccagggcaagactttttaaagatgattttataaagggattcatggatcctccttttcaagcacggaaggcgcggccgtttccggcggcgcccgttggtctcgaggcttggacgcggcgctttagcctcttcgactcggagagaaggggaattatacccaggccagcggcgaagtcaagaaagggcccgccggaaaggggctccggccgggcctcaattcccgagatagcccagggacttcagcatctccgcggttttcgggtcgagggtcctgtctttcttcccggcgagggcccggcgggcgaagtcgccgagccgtttctcgagatcgaggccgacgcggcgcggcatggccgccgtttcccagatatcggtccgctcccccggatcggacgacatgtcgtacatcttccgcatcctctgctcgggagacaaaatcatatgccagggcgcctcgataagggcgaaacgattgcgatcggactccggccggtacgtcgcggcgaataccggtgcgcccgcccccgccggcagcgccaggaggttccggccgggaaggccccggatcccctccagctcgaacatcgccagaaaagtcggggcgatgtccaaaagagtgaccggctcggcccgccgcgttcccttgcccgggccgccgggaacggagatgatcagggggacatggagatagactttttccaggaagttgatatggccgtaatggatcgccccggattcgagccggtactcccccagcccttcgccgtggtccccggcgacgaggacggccgtttcatcccgcaagccgagacggtccagggcggccaagagctccccgactttcccgtcgaggtactcgacttccttccggtacagctcctcgaccgccgtcgtggtcagatagagctggccccggaaccgcatcgtcacccggcgggcggtcggacagcggagggtgaggaacgccccgttccttaaaaaacgggttcccgtctcgggaatgatgaaccatcgctcggtatgctcccagaaaacgtctttcatcgcctcgtccgggccaaattcgagcgggtcgagccaggccgaaaacttggagggatcgggctggtaaggattcatggtctcgaacgccaggatgttttccccggcccgaagatcgagagtgacggtgttccaggcgtagtcgccgatccggaaggaacccgccttccggccgttgaggctcagggcgaggtcgtccggcatgcccggcggggcgtaggggtcgtgcgggtcggaataatgaacccagaggaaaaacggcttttggccgcgggcctccagccacggaatgacccggcggttgacctcctcggccgtcagataccagcgctcatccggaaattgatcctcataatgttcaaatccctcggccgtgccgaactcgcgggtcaaaacgcccagcgaaacgaaagccgccgtgtcgaagcccttcttccggaaggcctggacgaaggacgggtggtcgcggcgggaggcgacgatctggccgttgttatacgtcgagaggaggtggggagggcgcccgaaaaagatcgatttgtgggcgggcagcgtgatcggaatcgggctccaggcgttctcgtagagaatgccccgggcggccagggcgtccaggacgggcgtggccgcccgtccccgggaaagagcgctcaagtggtcggcccggaacgtgtcgagggtgatgaagacggcgttttcgggtttcccgttgtttcccgcgcaggccgccgaaatcaaggcggcggcgagaacggcaacggcggccggagaggatcgtcgtcggggcatgagctagttcccgatataccccagcgaccggagcatctcctcggccttgggatcgatcgaggcgtccgtcttttcggataggattcggcgggcgaagtcgccgagccgtttttcgaaatcgatcctcacggccggcggcacggcctccgtatcccaaaggtccttggtttccgcgggattatccgacaggttgtacatccggtgccggccgagctcgggattcaggatcatctgccaaggaccgtcatagagggcgaaacggttccgatcggattccggccggtaggtttcggcgaacaccgggatcgacgcgccctcgggaagagagagaagatcgcggcccggcaggtcccggagtccgtccaggccgaagagcgtccggaacgtgggggcgatgtccaagagggtcaccggctcggtccgccggattccggcccggcggtcgccgggaagggcgatgatcaagggaacgtgaagatagactttctcgaggaacttgatatgcccgcagtgaggttcgccggcctcgttggcgaattcccccagcccttcgccgtggtcgccgacggcgatgacggccgtgctgtcgcgaaggccgagacggtctaacacggctaaaagctcgccgattttcccgtccagatattcgacctcgcgggcgtactgcgtccgggtggccgggatcgggaggaataattgtccgaagaattccatcgtcaccttgcgggccgacggcgcccgcagaacgatcgtcgccccgtccttgaaaaagcgggccgttttcccgggaaaggatatccagcgtcccccgggctcccaagagacgcccgctgtctccggaccgggacggagccggatctcgtccaaacgggccgccggacggtccggattcgattgaaacggattgcgcacttcaaaaacgaggacattctcccccgccttgaggtcgagctcgacggcatgccgggcataatcgttcaggcaaagcgcggccgccggccggccgttgatccggagggcgaggtcctccggcatgtccggaggagcatagggatcgtggggatcggaataatgaacccagaggaaaaacggcttgccgccgcgggcctccagccaggggatgacccggcggttgacctcctcggccgtcaagtaccagcgttcggccggaaaccggtcatcataatggtcgaatccctcggccgttccgtattcgcgcgtcaggactcccaaggagacgaatccggccgtgtcaaaacccttcttccggaaggcctggacaaaggaaggggtgtcgcgccgggaggcggtgatctggccgttgttgtacgtctccaggacgtggggagggcgcccgtaaaagattgatttgtgagcgggcagcgtgatcggaatcgggctccaggcgttctcgtagagaatgccccgggcggccaagccgtccaggacgggcgtggccgcccggcctcccgaaaggacgcccaggtgatcggcccggaacgtgtcgagggtgatgaaaacgacattttcgggcgcctgaaccttcgaacatccggggaacagcgccgccgccgcggctaaaaccaaaaccaggcccgcgaccgggacgtgacttcgaaacggaaggcgcaaggacaatcctttgatgtaaattccctttcattatgtcgaaaacggaaaagagtgtcaaaagccgcggaaaaatctccggaagaaggccgtcaagaagaggaaacgatataagccggggcgatcccccccttgagggggaggatcgcccctttttccaaacttcgttccaatccggccgaagccggcggactttgttactgtgatttaaccgggttcccgtcgccgtccaggaccttcacgtctccatagcccagggtcttgagggccggctcgaccttggccctgtcgccgacgacgagccagaccatgctttgaggctgaacgacggtcttggccgcgcgggcgacctggtcgagcgaaagctccctgaccttcgctccgtatgtctcgtagtaatcgtcgggcaggccgaacgcgatcatgttctcgatcagtccgccgatgaccgcccccgtttcccactggccggccaggccgaggactttgccgtcccgggtccgcccgagctcctcgggcgtcggaggccgggcggcgatgaggtcgccgaactccttggccatctcccggatggattccatggtcttgtcggcttggaccgcgctgtagccgataagcggccggagacccttggaatccaggatcaccgttccggcgccgtaggaccagtgcttgtcctcgcggaggttcatgttgacccgggaggtgaaggtcccgcccaggatgtcgttcatcgtctcgatggcgatctcctcgggattggccttgggcaggatcagctggccggcgaagacgatcgaggagggcgagccgggcttgtcgatcaagtagatttccggcgccgtcctcggggcgaccggcccgatgttcttttgcggcacgtcgcccggcttccagccggcgaacagcttttcgagccggggcttgatttcatccatgccggccgcgccgaccacgatcaggacggcgtgattgggtttaaaccaggtttcatggaaggccttgaggtcggccagggtgatcgccgagacggaagcctcggtccccgagccggtgagcggcgttccataggcgtgtccctcgccgtaaaggaggcgcggcaggacgcgaatggccatggccatcggctgggccttttcctgctggattccggccagcatctgcttctggagccgggtgaattccttctccgggaaggagggcgaaaggacgacgtcagcgaagatttcaagcgagggatcgaggttggccttgagggccgaaagccggaccgaggagtggtccagggacgaaccggtgtagagggtcgccccgagcttggccaggtcatcgctgatctggagcgacgtccgcttggccgtgccctcgtcgagcatgttcaaggccagggaggccgtgcccggccggctgaattgatccgaggccgtgccggcgtcgaaaaggaggctgaagttcaccaccgggatcgcgtcccggcgggccaggatgacctggaggccgttggacaagacggcccgttcgagcttggggaaccgggcgtcgggaggcgtcccggccgccgggatcttcgcccgatcgatcgaggacgggacgaccgtcatttcgggatagggcagaatcgtcagaacgtatacgccgtctgagagccaggcctgggccgcccgcttgatgtcggccgcgcccgccgcgtcatacacagccaggttgttcttgaacgcgtcgggcgttccgccgaacacctgggaggtcgccaggatgtcgctcttgccgccgaagccgccgatccgctccatcccccggatgacaccgccgatggtctgggccttgacccggatcagctcgtcggccgtcgggccgtccttgaggaagcgggccagctcctcgtcgatcgccttttcgaccgcggccggctcgacgccgggcttgaccatcgcttcgatccggaagaggccggcgatttcgcgcgtctcggcgtaggccgagacctgggtggcgatttggtcggtgtagacgaggcggttatagagccgggacgatttgccgtcggccaggatcgaagcggccaggtccaggaagaggccgtcccggtcgccccagggcggaatgttccagattttgtagatccgggcttgggggacgcggtcctgggcggtctgccgctgctcaccggtccgcttggcgatgttccgtccgggcagggcgagcggcgggccgggcgggatgtcgccgaaatacgccttgaccttggcgaccgcctcgtccggggtgatgtccccggcgatgaccaccacggcgttggacgggccgtagtacgtcttgaaccattcgtggacatcggaaagcgaggccgccgacaaatcctccatcgagccgatgaccgtccagctgtagggatgccctttggggaaacaagcctgggcgatcagttcgtcggccagggcgtagggctcgttctcgtactggcgcttctcgttctggacgacgccgcgctgctcgtcgagcttggcttgggtgaccgcgcccaggaggtggcccatccggtccgattcggcccaaagggcgacctcgagagccgtcgcggggacgttctcaaaatagttcgtccggtcctcgctggtcgtcccgttgaggtcggtcgccccgatcttctccatcaaggggaaatagtcctcgttgtggttctccgagccgttgaacatcaagtgctcgaaaagatgggcgaatccggtttttccgggtttctcgtttttcgagccgacatggtaccaaacgttgaaggccacgatcggggttttgtgatcctcgtggacgatgacggtcaggccgttgtccaggaccgtcttgtggaagggaatgtcggccgaggcggccagctgtccgaaggacagggccggggccaaggccagggtcagggctaagacggcggccgccagccgcggtccgccgatcaaccggggttttgacgcgagcatcggttcctcctcgatatagcaaataggcgtgaatatttattatatacgtttttacccgcttcgggttatcgcccttcgccccggcgcggacaagggaggatccgtcccctcgaggattccccggtccgccgacgactcccgatttccgccgaatccgggccagatccgcggattttccgcatcggtcttttccttttttgttttaaaatcgggaaacgggcgagccggcgggatcggccgtccgcgggatgtgaaatcgggagacacggaaagacctcttcgcccgaaatcgaggagagggggcttgtgtctcctgatttcttttgctacgttgagaccggcatgcgaacgatcgtcgacgaggcggaaatcaagaccgaggtcaagcggtcgcggttcatcggccggagcttcatccgctcgacgccggacgaagccctggccgcggtcaaaacgctccgcgcgtccgagcccggagccacccaccactgctgggcctaccgcctcggccgggacggggaacaagcccgctaccatgacgacggcgagccccagggcacggccggcccgcccattctcgaggtcctgaaaaagaacggcgtcaccaacgtcctgctcgtcgtcacccgctatttcggcggcgtcaagctgggggccggcggcctcgtccgggcttacggcgacgcggccaagcgggtgctggaaaaatcggggctcaaggatcttcgttggatggtcgaggcggaggcggaagtcccctatcccctgctcggcacgttcgaaagcttcctggccggcgaggacgccgaggtcaccggaaagacgtacggcgagcatgtcacgatccggcttcgcctgcccgcggcccgcgaggaggcgctccgggaatattatgccgccctcacttccggccaatcctctctcctcatcctcggccgggatttccgctgagccggccggccgcgtcgagggatccgttcccgcggcctccacccgcccgggcgccggaatacctatcgaagctccttcacccggcgcgggatcccgggaatcggggaatctcccgccgctcaccggtgagaacctcggggatggggattcattcccgcgtttgacagacttgaccggatggcctattttaagccttcgacgaaattcttttaaggatagaggccatgaccacgattctcccgcgttccttccggccggcggccgccgctcttctgaccctcggctttctctgcctcgggccgatcgcgacgcgcctccaagccgatccgcctctcctgaccaaggccgaggcgacggacttcaaggccacctcgcgccacgccgacgtccgggccttcatcgacgagctgcagaaacgcagcccgctcgtccggattgaatccatcggccggacggccggcggcttcgacatccccgccctcatcgtggccgacccgccggtcgcttcgccggaacagctgcgccgcgacggccgggccgtcgtctacttccaggccaacatccacgccggcgaggtcgagggcaaggaggcctgcctgatgctggcccgggacatcgccgccgcggcgaagcgtccctggctggaaaaaatcgttctggtcatcgtccccaacctcaacgccgacggcaacgagaaaatcgacccccgcaaccgctcctaccagcccgggccggccgagggcgtcggtctccggaccaacggctggaacctcgacctcaaccgcgacgggatgaagctggagagcccggagatctcggccgtcgtccgcaacgtgtacctgcgctgggatcccctgatcttcgtcgactgccacacgaccaacggctccttccaccaggaggtggtcacctacggctggagcgccaaccccaacgtcgaccgcgagatccgaacttatatgagcgaggccatgatgccggccgtcgagaaaatcaacgaggacaagcacggcgtcctgacgtgcggctacggctatttccgcgacgataaggatccggacaagggctggacggcgatggaattcgagccccgcttctcgaccaattatttcgccctgcgcaaccgcttcgccatcctgatcgagaacaacgtctacgccgaatacaaggaccgggtctggggcaattatcattatctcgagtccctcctcgaatacgcctcggcccatgtcgacgagatgaaagccctggccgcggcggccgacgccaggtccgtccggcggggaatgaacccgtccgctggcgatgggttcggcttggaatacgattaccgtcccctcaagaatcccatcaccgtctacgcctacgaaaccgaagtcatcgggaccgagggcgcctggccccggcgccggtccacgggcaagcttcatgtccggacggttccctattacgccgacggcttcgccacccgctcggttccgttcccggccgcctacctcgtcccggtgaccgagcccgccgtcctcgacctgctgctccgccacggcctggccgtcgagcggttgaccgccccggtcgaagcggacgtcgagacgttcaagatcagcgagatcaaggcgcccgaccggctctaccagggccaccggctgaacgcggtcaagggcgagtaccatccggggaaagcggccttcccggagggaaccctcgtcatctccaccgcccagcctctcggcatgctggccgcctgcctgttggaaccggaaagcggagacgggctggtcgcttggaactacctcgacaagcacctgtcctccagctggggcggggggacggtcgggacgaccgttccgatctaccggctcctgaagccggcggttctgcccgcggaagccgtccgataggcccggagcctgtccccggccggcggacggattccccggggggaggaatccgcggagcattcgcgccgattcaaaataatccggcgccggccgcccgccgcttcgaagacgacgggaaggatcggaccggtcgcgacgatgaacaccgccccggacgcctcccgaagcgcgaggacccggcggtctttctttctcagcggtcctccggccccgggagcgggacgctctccttttcgcaaagccgccggaggacgccgagactccgctcgtcggcgtaatcgaaaaagtcgccgtacggccggccgagacaggcgaggacctcggacgtttgagggtcgagatcctcgttttccgccggaagcctgattccggcaagcttcagggacataaagccccggacgaatccggtcgtgaccaggacccggggcaggccgtggttgatgatttcctcccgaatccgccgcaggcggcgctcgtcgaccgcgtccatcaggacgaggtacttctggtggagaacccactcgttgatcagcccgacgatatccgccggctcgaactgccgccagaacgatcccggccattccggccggacgaatcccccgatgacgaaggcgccggcctcgtacccgaaaatcccccgctcccggccgagggcgagggcggctcgaagcaggcggatctgcctgtccggcgtcagccgctcgaaagccgccaggttgatgaggtgcgtcccgagggtcgcctcgaacagatgatcgatcacccggccctcgttgaggtcgaagctgcggttgatgaactccccggccttggcgctgtcccggagcctcccgtaacgaagagcgtggcccaggtcctggaggctgccgaactcggcctcgccgaatttttccatgagatcccggtacgccgcgtagtcccgggccagctgctcgaaccggggccgctcggcgggcgtcaggtcgacgtgctccccggccatgaagcgcagcaggcgggccggggcgtagacggcttttccgaggaacaggcggcgccagcggctggaaatcgtgacccagtcgccttcccggacgacccggccgtcccggttgatcatctcccgcttgtccggatcaatccggacgccgtcgctttcgaggctcaaaagcgagggaatgcccaggttttgagcggcggtcacgacatggatcgccgccgggctcaggctgcaaatcccgctgacgaccggcagatccaccgcgtcctggggggtgaagcgctccttggccaggatgacgttttcccgaggccgttcggccttggcctggcggacgcggtccgccgagaaatagagccggcccgagacggccgcccggggcaggaccgacatcccctgggccagccggggcaggacttccagggatttcggttcgatggcgtcggactcgatctgccggatatggtagggcttgatgagctcccggactcggccggccccgatccggccggcccggtgcatatccatcaccgccgtcaccatcccggccccggccagctcggccgcgttgacctggagagtcgtgaacgtcccgtgcacgcccgtgaactcgacgatgaccggtccccggaagatctcctccagctgattgagacgatcccagaaatgatagatggccggaaattcctcccgggcttcctcccggtggaagaacgtccgctcctcgggctgaaggcggccggtcatcaggtcttccccgaacacctttcgggcgaactggacgaagacgccctggccccggcgggggtggcggctgtagagaacgcccggataggattggtcgtccatgacggtgcagaccatccgctggaggatcagggacgggtaatggatctcccggtccatgaaattccggagggcgtccaggtgggtctcataataggcgtaggccttctcctggaagaattcgagctgggcggccgccgacgtcaggagctccgggttgcggcgggcgatcaaggcctcgacggcctcggtcagctcccgggtccgggccggatggagagacggatgaatctccttttcgatcggggcgaaggcctccggatcgagggcctcgaggatcgttttccggttgttgagccggatcaagccggcggcttccttcccgtagcggcggggaagccctttgaataccgccggagtcaggccgacgttcaggtacgtcggcatgaatcccgggaagtattcgggcagggccgagcggacggcgatgaggagcgggtcgtccggattttcgagcttccggccggtcaggatctccaggtcatggacggcttcccggagatgtttccggcgctcctccgggggtagatgataggccgcggacgaaagcaggcagaaatccgcggtcgacaggccgcgccgggacaggtcgaacaggatccgccccttctggctgatgaccgaggccggatattcgccggccgcggtataggggatcaccaggtcgttttggacgatggacggctcggcgaaccgggccgcgatgcggagataaagagcgttcgtccggcgccgcagctcggcggccgcttcgatgtctcccctccgggcccggacgatgaggtccaggtggccgagggcctcgctggaggcgacccggtccaaaaaccggacgtcgtaatcgcggacgcggatggtaaggcgctcgcccgagaccgtggtgcagtcgatttccggcgagagggccccggccggaggaacgttccggccgcctcggacgcggcattcaaggttggcgtggatgccccgggcgctgaggtactcggtccggacgacagcgatcttccggatgatccgcgggccatcctctccgctcatgcctccgtcccggcctgattcggaccgccggcggcggccgtcggcagggcgacatggaaggcgatccaggatccctgttcgccctcggcccagatccggccgccgtgcttgtcgacgatcttcttgcagatgtagaggccaaggcccgagcccttgacgccctcggtgcccttctgtttcagccgctcgaatttcttgaagagccggttctggatgtcctcgggggagatcccgacgccctcgttgcggaccgtcaagaccgcctctccgcccttccgctccaaggtcacctggacaggcgtcccttcccggccgtatttgatcgcgttgttgaccaggttgcggacgacgatcttgagcagttgggggtcgcccaggacgggcggatcctctttcacctcgacgacgatcggcatccggcggagattgtccttgatctcgggcacggccgtcgtttcggccacggcctcggccccgatccgcatctccttctggaaggaggccaggtcgtcgatctccatcttggacaggtcgatgtaggaccggatgacgtcctccaggtaggcgcaattacggaggatggtttcgacgattttttgctgggccggctcgagcttgccgaaatacccgcgatagagcgtctcggccgtcgtctggacggtggccagggggcttttgagctcatgggagacgatggccaagaggtcgatcattttcgcctcggcgtttccggcccgggctttgacggcgttgcggacgacctccttgatctcgtcgggggtgaacggcttgggaatatagtcgaaggccccgtttttcaaagcctcccgggccgtctccacgttggcgtagccggtgaagatgacgacgatgatctccggccgctccttccggagggtccggagaacttccatccccccgatacccggcatcttcaggtcggtgacgaccacgtcgtagtcgccctcccgggccttggccaggccttcctcgccggacagggccgtgtcgatctggaaatcctccttggcgaaaatcctccggcagctccgcaggacaatctcctcgtcgtcgatgaaaagcagttttcccgccataatcctatcctttgcacccgtcaatcggcgggcagcgtgatcgtgaactcggtgccccggccgacggcgctcttgacgtcgatcgtcccgttgtggcgccggatgatgccgtaaacgacgggcaggcccaggcccgttcccttgcccttatccttcgtcgtgaagaacggctcgaacagccggacttggtgttccggggggattcccgtgccggaatcggcgatccggaggatgatccggcgcttctcccggtcgaacgaggtcgtcagcgtcagccgcccgcctcccggcatggcgtcggccgcgttcatggccaggttgctgatcacctgcgtgaactggtggacatcgacggggatgcggggcaggtccgggtcgtattcccggacgatctcgatatcctggaaatgaacgttccgctccaaaatagccagggcattgtccaggacggcgttgatatcggccaggattttctccggaacattctcccgggcgaaatcgaggattccccggacgattttccggcagcgcagcgtctcgtcgcggatgacctccaggtccttggcgtattccgtcccctggagatcctcgagaaggaggctgctgtacgtgagcacgccggtcaggggattgttgatctcatgggcgatgcctgaggccagccgcccgagcgaggccagcttctccgatttgagaatcgtccgttcggccatggcctggagctcgcggtcgcgctcctcgatggccgaggccatcacgttgaatccctgggcgattttccgcgtgtcgtcgtcgtccttcgggagcgtctcgatccggtgatagttgccgtcggcgatgtcctgggtggcggccatgatccggcggaccgggcgcgtccagaggccgaccaagtagatcgagaggacgatcgcgatgagggtggtcaggccgatgaccaaaagataaaggacggcggtcgtccggagaacgtcgtcgtacttgtccttgaggacgccggcatagagcatgcccaccggccggccgtcgatatccttcaggggggcataccccgaaatgtaccagctgtcgacgacgaaggccgggccgatccaggtccggccctcctcgaagacgttccggaagacctcgtccgagactagcgtgccgatggcccgcttccccgcgctgtccatgaccgtcgtggccacccggacatcctcgaggaaaatcgtcgaggatccgacttcgcggccccggttccgctcctccttgaagaggaggcggcggaaccggtcgatgaagctgtcgttgttgttgagcaggacggccgcgtacagaaggccgaccattcggccgttctccatgatcggggaagcggccttcatgaccagggcccggtcttcgatgctcgactcgtgccggcgcgacagcggcgtcgggacggccttgatgggggtccgctccgccaggttgcggccttcgttgcggatgttctcggggccgagaatgcccgtcccggcggccggcttccggttgcggagaacccattggatgtgccggtaatgggcgacgctgtcgccccaggcgtcgaaattgttggcccggacgagaacggtcccgtcgggattgaggacgttgacgatatcgaagccgaactccgtcttgatccggcccaaggcctcccggagataggcccggtcgccggtcatcgtcgcttggacgatctcggaggtcttggccacgtactggacgatccgggaccgcttctcgacctcctcgttgtaaagctcggtcgtcgcggccagggagttgcggaccgactcggtcgcctcgcggacgaggttcttgtcgatgatgttgaccccgatgaccagggagagcgagcccgtcacggccacgatcagcaggaggctgaccaccagcttgaaccggatattggaagggaacaagcggcggcgcatggccggcggatcacccgaggagggccgcgattttctggacgagctcgtcgaggtcgaccggcttggtcagaaaggcgttgacgccgggcaggaagctgtctccgggatcgagggagaaccgggagttggtgacttggccgatggccgtcaggatgatgagggggacggtccggacgtcgcggtagcgggagaacggccgcgcgctccggatctgcccggccgcctcgaagccggccgtgtccgtttccatcatcacgtccaggatgaccaagtccggcttttcggccagcagggtcttcagcccctcggccgcgctgtaggccgcggccgtctcatagcctcgggattggaggacctgggagaggctctcgacgaggtccttgtcgtcgtcgacgatgaggattttcttggccatgatccccccttaatccttgatcagcttgtagatgacgttgcgctcctcccaagccttgttccggaggtacgcgtcgatcgggaattccacctgtttgagctccacgggggcggatttctgcgggacgaggcccagggcgagggccacgccgtagatgatcgcctccgggcggggcgggcatccggggatgagataatcgacggggacggccgtcgccccgccgccggtgacgttgtacgtgtcgaaccagcagccgccgccggccgcgcacgacccgaccccgaagacgagcttgggggcgggaatcgcctcatacgcccgcttgaccaggggaagggtcggccgggtcaccgccccggacaggagcataacgtcggcgtggcggggcgagccgacgagcttgatcccgaaccgctcgacgtcgtaatacggcgtgaggacgttgaggatctcgatgtcgcagccgttgcacgcgccgctgttgcagtgatagagccacagggacttgggaaaggctttcgccgccgcccgggcaaagagagccgccatcataaacctccgatcttttcagggcgccggtacgcctcggtctcggccagcgcctccggggccatccggtccgtcgtcctccggaggacggtccgggcctcgaggctgtcatagcggtagccccgaaggtccagcttgtcgatcgcattcttgatttccatgtcgaagcaccgcccgcaccggttgcaggtcagcatgaacagctcgatcgtctggctgacatcctcccgccggccggcggccagctcgaactccggcgacatcacgatcgccttttccgggcagagatcggcgcaccgtccgcagtaggtgcaccgcgatccgtcatagagaaggacgcggatttcctggcagaggtcccgcaggaggatcgtccgggccggacagtggttggcgcacccgccgcagccgatgcacttcgtgtgatcccagaccggctggccgcggaatccccgggggacgggtttcttgacgaaggggtatttcagggtcaccgtcccgggactcagggccaggacgatttgcttgatcttgctggtcagccacatgattcttcctcttctttcaccgtccgagcactcctaaaccgacggccgcgagggcggccacgatcaggacggcataatagcggacggcctggtcgatccggagccggggattcgtcgccccgaccagggcgatgaggacgaagacgacggccatggccaggagctggacgaggatgtcgagggcgtagacgccggtccgcaggaacggcaggaacaccgagacgaacagccaggcgtaaaacatccgcttgatcattatcgcatatttgaaaagggccaggtgagggccggagtattcgatgaacggaccttccagcagctccacctcggcctcggcgatgtcgaacggctggcgggcgacgaacgcctgcagagcgagcaggtagacgaccagcatcagggcggacgaaagtccgaaggccgctccggccgccgccggcgcggccgcggccaggctcaggctcttgattttcaccgccccgaggatcagggtcatggccaggaccggctcgaccatgatcatcgtgatcatctcccggctggccccgatcaggccgaaggtgttgcggccggccagggcaccgaacaggaccgaggcgccggcgagggtcaggaggtaaatgacgacggtcgcgtccatccatccggccaagacgcccgcccgtccgccgaaggggatcacggccacgaccgccagggtcgcggcgaaggccagaacgggggccagccggaacggccaggttccggcggcgtccaggcgttccttgcccagaagcttgaacaggtcgaaatagggctggatgaccggagggccctgccgcgactggaccttggccgtgagcttccggagaacgccgtcgaacagcggcgcgagcaggaggaaaagaatcacgttgaggaacgggatgacgtagctcatgagcgactccgggaaagacggtccatttcttttttgctccacacgcgtctgcgtcccgagcggcggtcgacgaccgcgacccggtcggtgcaggagaagcacgggtcgatgctcccgaggatgatcgggaaatcggcgaactggttgtcctggagcatgcggggaatgccctggaggttggtgtacgtcggggcccggacccgccaccgttccggccggttctcctcccccgtcaggacgtaatgaaaggattcgccccgcggcgcctcgaccatcgaccagccgggccggagggcgggaagggcttcggccgcctcggtcaggacggggccgtcgggcatccgctcgagggcctggcggatgagcttgatggattcgaaaagctcggccaggcggacgacgatcgtgccccacacgtcgccgtccggaacgaccgggacggcgaacgacagctcgtcgtaagcggcatacggatgatcgcgccgggcgtcgatgtcgacgccgcggccccgggccgtcggccccaaaaggctccagagaaccgcttcctccttcggaacgtgcccgacgcctttcgttctccggtggatcagcgtatccccgacgatcgccttttcgaaggagaccagctcggcctcgaggctcttgaggatggccagcgtctccgtcttgatctcgggggtgatgtcccggcgcacgccgccgacgatcaccatgccgtacgtcttgcggttgccggtgattttctcggccagccacatgacctgctcccggatccgccaggcgtgcatgaagacggtgtcgtaaccgatgagatggccggccacgccgatgagcaacaggtgggagtggaggcgctcaagctccaggcagacgacccggatgaattccgcccggcggctgatcgccaagccggcggccatttccacggcctggcaataggcgacggaatggacggagccgcagatgccgcagatccgctcggcgatgaaggggacttcgttgtagctgacctgcgtctggcacagcttctcgatgccccggtgggccatgaagccgcggtaatcgcaatgcttgatcgtctcgccgtcgacatagacggcgaaatgggccggctcgtggagggtcgcgtggaacgggccgaccggaatgatcgtcgtcccgggcggcgcctcgtcgagctggtaggcgacgtcctcggccgcgggagggatgaggttgtacggaacctcccgccggagagggtaaatcccgtccggccagtcgtcggccgtaacgagctttttcggcttcgggtggcccgggaagttcattcccaaaagatcgcggcattcccgctccgaccagccggcggccggaatgtccggagtgatcgagtcgaagtccggatgatcggccggcgcggccgtccgcagcccgacggtgaaatggtcgccgtcgaaggcgaagaaatggatcaggcccaacgtcccgttccgatgacggtcgtcggtgccgaccccgacctggtagcggccgccggctccgacgagccggttggccgcgtcccggagccgggacgggtcgatgtcgataaacaggcggccgggcgcggccgggctcgatccgccgacggcgccgccgaattccgccttgagaacttcgaagattttttctggagtcatgactcacctccgccggtccagcggaagaaatgtttcagggcggcgaacatcccgcggtcgacgtaccggttcttcccgtcgagctgctggtagccgcacagccaggtggggacggcccgcgtcttcgatcccgccgagcggcgcaggagcgcggccgccaggatcgcgacgacaagcagccccaggataagaaggggcgtcagcgcgctgaaatgcccggcggcggcctcgccgatacccgggacggccgccaggccggccgcccgctccgcggccgacgacaccccgcccaggaacaaggacggggccaggccctggagaatcaccaggattcccaggatgatttccggcagcagcatcggaagcgggacctcgcggatttgtttccgggccgtttcctccgcccccgaggcggtgaaagccaggccgaaaaacttgacgtagcaggccagggtgacggcgctggtgaacagggcgatgattccgaacaggacgagaacgggggaaaccgcgccggagagaagggcggccgagatgatcgtttccttggaagcgaagccgctggtgggcggcatcccggaaatcgacagcgaggcgatcgcggcgatgacggcgctcgcgggcatgagcgtgatcaggccgccgagcttgttcaggtccttcgtcccggccgcgtaatgcaggttgccggatatcaggaagaggaggcccttgacggcggcgtggttgacggcatggaagagagcgccgagaagggcgaccgcggccagggcccggagggccgggtcggaggcggtcgaggcccagagagacacgcccagggccaggacgatgtagccgacttggccgatcgagctgaaggccagcagccgcttgacgtcgctctgcttgaccgactggagcgtcccgacaaacagggtcaagacgccgatcgcggccagggcggggccccagaagcggggattgaacgcggccgcggacggagccaggcagaaaaacacccggaacaggccgaagacgccgatcttgagcatcgcccccgacaacaaggcgttggccggcgccggagcggccgcctgggcgtcgggcagccagatccggccgaggggaaagacgcccgccaggaatccaaagcccagaacgaacagggtcataacgatgacaaagccggctccgtccatcgcctggactttttggccgagagcctggagggattcccccaagcttccgccggccgcgaggcctccggcgatcaccaggaaccaggcggcttccatcagaacgagaaacttgccggcggcccggacggaggccgcgtttttctcgaaacggatcaggaaaaaggacgcgacggccatgacctgccaggcgatggtgaatccggccgagaggtcgttgacgacgaccaggccggccatccccaggacgaacaggggcagggcggcgtaaaatccgtccaggcggcgttcggccggaaaacggtccgcgtaccgcacggcatagatcgcgctcatggccgccaggaaggacacgatgacgagaaacaagccggccaggccgtccaagaggatcggaaccgcgatcgggccgagggaaacggtccgggcctcggccatgccgcggccgaaaacagccccggcgccgaggaccaggaagacagccgcggccgcggcggtcagaaccaggtgaacgattccggccgcccgacgccgccgggacaacaggggggcaaccagggcggcgagaaggagaaggccgaaggcggcccaaagagccggagaaatcggggtgctgagcgtggacatcagatcgtctcccccagggttttgatttgccgatacgtatagaccgggccgtcggtgcagaccagggtccggccgatcgcgcaatgctggcacttgccgatcccgcatttcatgtggcgctccagcgtcgagatgatgcattcgtccttgaggccgcggcgggacagctccccgatcacggcgttgaacatgaccggaggtccgcagacgaaggccgtcgtgccgtccaccggcaccttggctttttcaatcagggtgtggacgaacccgacctcgcccgtccagccgggctcctcccggtcgatcgtgacatacgtctcgaatccctccgtcctccgccattcgtcgatgagcggacggtacatcagctctttcgacgacttggcgccgtagagaaggatgatccggccgaacttctcccggtggaggagggcatgaaagatcgaggaccggagcgggatcaggccgatgccgccggccacatagatgaggttccggcccgccatctcctcgaacggaaagccgttgccgaacgggccgcggaggccgatcttgtccccgacgcccagggcgtgaagggcggaggtgaccttgccgacgttccggacggaaagatgacggcggtccttctccgggctccagggcagggaaacggcgaattcgccggccccgaacacggtgcacatcacgaactggcccgaacggatggaaaaggagcgctcgagctccgggtcctcgaagcggaaatagaaggttttgacgtcctcgatctcgtcccggatctccgtcaagacggccggaaccggaacggcgaccgcggcggcgttttttctcttgtccatggcttacttccccgtgatctcgcgccggatcgcggtgacgacattggccatcccgatgtcgccggggcagacccggacgcagcggccgcagccgacacagcccggccggaggtattttttcgattgagaaaacgaaagcttgcagaagaatctcttgttccgccggtcctcgacgggccggcgggggttgtgctccccggccatccgggcgtagccctcgaacgagcaggaatcccaggtccggagccgctcggtcgtcccgtcccggcggttgacatcctcgatgttgaagcaggaacaggacggacagacgaacgagcaggccccgcactcgaagcactgctggccgatgtattcccaggtctcgttcttgacgaaaccggtcgtcaggcggttgaccgcccgggatatccaagccttgttctcgaccgccgccgcctcgaaccgagagatcgagcggtcgatgacctcgtcccgccgccggccggcgtccggcccggccggaggcaggctcagggacgcggccagctcgcggccggcgtcgctcccggcctcgaacaggtaggcctcgccgaggtcggtcaggttgacgtcatatccctcgcgggccgccggaccgctgtcggtgcagacgcagaaacactgggcgaagggggtgacgcacgtgacggagacgagaaacatccgccgccggtgggcccggtagaattcatcgacgaattcctggccgaggaagaagcggtcgaagcaaagaagacccgtcaggtcgcaggaccggatcccgacgagggccttcggccggacgagatcctccggaacgatccggagatccttggtttcccggtcataggcataagaaaggatgcgctcccagtgggggaagaccgcgaacttgggagaattggccgggatcggggcgtccagccggatcgacgaggaatcggccgccttatcgaaaaacacgtccccggaaaccggatggacctgggggccgtacatctcgaagcgggcggacagggcggagagaaagcggggaacgtcggatttggccagaagatacatggtcacaccttttccaggcggacggggatgacggcatcctcgccgtattcgaccgcgtccgcgtgaggcacgagaaaatccgggatcatcgaacccacgaaatagggcgcgtacaccgtcccgggcggcacttcttccgagacccgggccagcggagtcatggatccgcgggccgagacgacccggacgggacgcttgtcccgaaggcccagggcggccgcgtcgtcgggatgaacctccaccaagccccggggatagagaagaaggagggcgttgtattcccgccgggggatgaaggtgtttttcatgatgttgttcaagtgccaatagaaataagaccggccggccatcaggcggaaggggaattcggccggggccggctcggcggcggcggaaaaggcgccgttgagggggacgaagcgaaggcggctttggtccggtccggatccgcccggccactgccatccgccgaaccgggattccagggccgggtgggccgccccgtgatattccggaatcatccgggtgatctcctcctggacgtcggccgcggaccggtagggccaggcctgtccccgccgggccgccaaatcggcgtaaatccgccagggcgggcgggcctcgaaccggggctcaatcttgcggcggttgagctggattctccgctccgtgttggtgtacgttccgtccgtctcggcgtaggtcgtcgtcgggaggacgacatgggccgtttccttgaacgggttggcgtatgctccgaggtagagaacgaactcgagcgacttgatccggccggccagaagctcgatctcgggatcatggtcgacgaccaccagggccttgagtccggaggaagcgtcggccaggaggctttcgaccgaacggccgcgcccggcgttgacgtccttcccccagctccgggcgaaggacgaggccgcggcctcgtccggaagccgacgccagcccggcagaacgtccggggcggcgcccatgtcgttgaccccggccaggttggaaacgccggtcacgggaaggatcgcgcatccctcccggccggcctttccggcggccaagaacaggttgaaaatgagggccgtggtttcccgggtcaatccggtgatcccggtcgaaaagatgatgacggccctccgggcggaagccaggcggcgggcgacgtcccggatcttgtcgaacggaaggccggtccgggcctcgaggccggcggattcgagaccctccagggatttgcggaatccatcaaagcccgccggcgctcccgacgccgaatccggcggatggtcttcgaggagggccttggccatggcggccatgacgatgtttttcgttcccggcttgttctgcaggtgcgtcccgctgagcttggccatctgggtgaggcgcgtgctgagcgtgacgacgtccgctcccccgcgggcggcgaaatgaacgtcgctggcgatgatcggattctgccgggtcaggtcggtgccgacgacgaagatgaagtccgccttccgaatgtcggcgatcgaacccagggcgcccggccggccggttccttcccttaaaacttcggccgtcgtcggataccagacgtcggacaagacgctgatgttggccgagcggaagaccccgcgggccagccggaccagggcgtaggcgtcctcgttggaggatcggggcgaagcccagaagccgatctcctctcccgaaaacgcccccaggcgggcggcggcgacgtcgagcgcctcatcccaagaaacgggagtcagccctccgcctttgcggacaagagggcggggaatcctctcctcggtgttgagaagctcgtggatgtgccagccccggccgcacagccggccccgcccgacgggatgggaggacgaggggaacaccccgcggatcgtcccttcctccacctggagcatgtggccgcatcctgttccgcagaaattgcatatcccggtttgatagctcatgaccgctcctcgtcctccctcctcgggggaaggacgttgatcgatgttccgtccccggcggtccggacggccgaaatcgagtcttcaagacacttcggcccgacagaaggttctaggaattggataagaggaaaatcctaggtgccaatctagcaaatctcgtgaagaaagtaaagggggtgtttgacagaaccggccgaagcggataaagtgaattttctaaaggagaaaaaacctcgtccgatctcattcccgtccggagaacgccatgaaaaaatcattccgcgccttggcgctcgggcctattttgctctgcctcgccgctacggcggcgtccggcgccgtgggccggcccggtgattttcagttcggccacttgacgattttcaacggcttgtcccaaggctcggccatggccatggtccaggacgaacgggggtttctctggatcgggacggaggatgggttaaaccgctacgatgggtacggctttaagatctatcgtccgacggcggggccgaacggtctctccgacagcctcatcaacactctattcctggactccaagaagacgctgtgggtcgggacgatgaggggcctgaaccggtatgaccgggaccgcgacgacttcacccagtttcatccgcatccggccaatccgcggagtctgagccacgactacatcacggccctcgccgaggacgccgacggaatcctctggatcggaacagccgggggaggattgaattccttcgatccggcgtccggcgaattccgggccttcctcagccgaagggccgaacccaaaactctcagccatgacgaaatcctctccctctgccgcgacgccgcgaattacttgtgggtgggcacggccgacggattgaaccgcttcaatccgcgctccggcgaatccgtccgcttcaaccatgatccgggcaacccccacagcttgagccacaaccgcgtcctggccctctaccaggactgcaacgggatgctctgggtgggaacggccaacggcctcaaccggttcgatccggagaccgggcgtttctcccgttatttcaattccacccgggatccccggagcttgagcgataattacgtgacagccgtcttccgcgaccgcctgaaacggctctgggtcgcgacccagaacggcctcaacctgtacgatgaggcggccgacgatttcttcgttctccgcaacgatccgacggatcccaagagcctggccttcgacgacgtctacagcttattcgaggaccggacgggcgtcctttgggtgggaacccgcggccgcggcatcgacaagctggccgcggaaaattcccgcttcgccctgtaccagccccggcgcggcaatccccggagcctgggatcgggttacgtccgggccatcgccgaaagccccgacggcggcgttctgtatgtcgggctccaggaccggggcgtggacgccatcgaccgggccacgggcgaatacacccatctccgccgcgtcgagggcgtcgacaactcgctcaattccgagctcgtctacgccctcgccgtcgacgattcgggaaccctttggatcggtacctacggcggcggattgaattcctatgacccgcggaccaagacgttccggcattacgttcacgatccgggcgatccgcaaagcctcagctataacgacgtccggtgtctggccgtcgacggtccggatcggctttgggtcgggacggacggcggcggcttgtgcctgctcgacctccgcgcccggaggtttatccgctaccggaacgatcccggcgacccggcaagcttaagccacaaccaggtccgctcccttcacctcgatcacgccggaaccctgtgggtcgggacgttcggcggcgggttgaaccgcttcaaccgggaaaccggcggcttcgccgtctggcggcacgacccggccaaggcctcggccaccctctgcggcgatttcatccccaacatggccgaggattcccggggacggctgtggatcgggacgacggccggcttgaatctcttcaatccggccgacgggacgttcgagtgctacaccgaggagaagaacggtcttccgaacaacgcgatctacggcgtcctcgtcgacgaggaggactcggtctgggtttccagcaaccggggcttggcccgatggaacccccaaacgagggctctgaaaacatacgacatctccgacggactccaaagcaatgagttcaacggcggagcgaggtaccgggcgaaatcgggagaaatgttcttcggcggaaccagcgggctcagcgccttcttcccggccaacctcaaggacaatcctttccggcccgaggtcgtcatcaccaatttcgaggtcttcaacaagccggtccccgtcggcggcgaggtgaacggccggatcctcctcgataaatcgatcactgaaacgaccgatatcgacctccggttccgcgaccgggtcatcaccttcgagttcgccgcccttcattacgtcgcgcctgaaaagaaccgttacgcctacatcatggagggcctcgacaccggctggcaggaagtccagggccgccggttcgtgagctatatgaatctcgatcccggccgttacgtcttccgggtgaaagcctccaacaacgacggcgtttggaacgaagaggggacggcggtccatctccgggtcattccgccgttctatatgatccgctggattcaagcgctggccgtcctgctggcgggtttggcgatctatggggcggtccgcaagcgcatccggaacattcaccgtcggacgatcgagctggaggagaaagtccaggaacggacggccgaattgaaaaaggccgagggcgaagcccgcgaggccaaccgggccaaaagcgagttcctggccaacatgagtcacgagatccgaacgccgatgaacggcattttcggcatgaccgagctggctctcgaaaccgatctctcccccgaccagcgcgagtacatggaagcggtcaaggcatcggccgattccctcatgacgatcatcaacgacattctcgacttctcgaaaatcgaggcccaaaagatcgagatggagaaaatccctttccacctccgggacacggtccacgcggccgtgaccggcgtcgccctcctggccgaacggaagagcctcgagctggcctattcgatcccgggcaccgtccccgacgggctgatcggcgatccgggccggttccggcagatcctgaccaacctcttgagcaacgccatcaagttcacgaacgagggcgaagtcgtcgtttccatcgacgcggcccggcgggccgatgatcaagtctggctccgcgtccaggtcaaggacaccggcatcggaatcccgcccgacaagcagcgcctcattttcgaggccttctcccaagcggacacgaccaccacccgaatgttcggcgggaccgggctgggcttggcgatttccacccagctcgtcgccctgatgaagggaaagctcgaggtcgaaagcgagatcggccggggcagcacgttcttcttcaccgttcctttcggccttcatcacgaggaagggaaggcggtcacgccgctccgtctttcggacctgaaggatctgcccgtcctcgtcgtggacgacaacgccacgaaccggaggatcctccacgaaatgctgtcccactgggggatgaggccggtgaccgtcgacggcgcccaggccgccctcctggcgctccagcaggcccgcctcgagggtcgcccgttccgcttgatgctgaccgacgcgaacatgcccgagatggacggcttcgacctggccgcccggatcaaggaagagccccattacaaggacatgctcatcatgctgctgagctcctcgggattccggggcgattccagccgctgccgggatctcggcctggccgcatatttaacaaaaccggtcaagcagtcgcttctcctcgacgcggtgatgatgtcgctgggcgacaaggaggctcccgccggccaagcccggttgatcacccgccactccatcgcccagaaccgttcccgttattccgtcctcctggccgaggacaacatcatcaatcaaaagctggccgtcaaaatccttgaaaaccgaggccaccgggtgacggtcgtcgaaaacggcgaggaggtgctggacgccctggagaagggcccgttcgatctcatcctgatggatgtccagatgccgatgatggacggcttccaggccacccgggaaatccggcggcgggaggtcgccacgaaggcccaccagccgatcgtcgccatgaccgcccacgccatggtcggggaccgggagaaatgcttggaggcggggatggacggctatatctccaagcctctcaagccgctcgatcttctccggacgatcgacgaaattctggcgcgtcgtccgcgcgaggaagaagaggaaccggttcttccggtcgaggaggacaacgaggagccgcgtccctcctgaggataccgggacgtgattcccgggccggcggacaccaaggaaaaggaacggccgccggccggacgaatcaccgccccgccagcgcgcggtaaagacgctcgggagaggcgccgaaggatgcggccagatcctccaagctccgggacggatcgtcgacccgccaaccggcccgggccaggcgttccatggcgtcctccacggacacggggacgctccggcaaagctcggccagactcatcccggcggcctcggccgacggggggggaaccgtgacggccagggcgccctgcttgatcgccgcccgggcgtccatcagcctccacagcggcttccaccggaggaccgccccggccgtcaggacgacgacgatgagcgtcgcggccaggcattcggttttcgccccggaaagagccgaagccctccggcggagatagccccaaagagctctccaattcaggatgacatgcaggacggcgaacgccatcaaggcgacgacgatcagcgtatgcaccccttcccagctctttttatcgagaccgagaacggaccagccgctccaggcggccacgcttccttccggacggaaatacatgacgatcccggaaacggcggccgccaggaaagaccagaggagtccaaaagaggcgaacgcccggctgcggaagcgttttccggctggtttcgaagcggttgcggtcatgattttcctcctccggactgtcctgaatccagcccgggcgttcgtttatcgagatgcaggcggattaaatagagaacggtgcacagatggctgatccctccgatgaaccgttccttgaccggccctttgggaattccttcgatcgattcccggatttcggccatcgccgcctcgacggcggccaagccggcctgaagctcgtcatccgaaaagcggccggagagaaccccgacccggcccggattctgaaagactccgcgataaaattcccgctccgccggggacaaccgccggatcagacgctccgtgacgcagagccggacgagggcgtatcccgccaggacggattcgcggtcccggttgcagcttgtgtcgggatgccgccggaaataggcttcccccagctcgatcatttccgcggcgtcgaggacgaaatcgccgccgagcgcctcgacggcatgccggaaggcttccgcatcggggcaacgactgtataactctccgagcatcgggttagagggaaagcccccgccccgtaaggacgggctcttcagctcttggcgatccgccccatgacggccaggagcaggtcgaaattgaccggtttctggaagatgccgctgaagccgagatggccgaatcccacggtttcggccgtcgcgtctccgatcgagctgaggaggaagatggggacgtccggccgctccttgcgcatgatcttggcggcttgggccccggcgtccaggtcctccatcatcatgtcgcacaacaccacgtccggacggctgcggcggaaggcggccacgccgtccttgccgctgtaggcgacctcggtttgaaaaccgaccgcttcgagaaccgctttcaccgaatcacagatcgccggatcgtcgtcgatgatgagcacttttttcggatcggacatggccacctccgagaaacggacgtcgggcttattctactcgatcgaccggccgaaatccagaccgccgatggacggaggaaaggcggttcagttacaatacccgcgccggcgacggacattcctcaaggacggaactcatgaacacgggaagaaggatttctcgggcggaacggctctggggcggtcttctcgccgcggctctcctggccgggacggcggccgcttcccaaacgggcgagatccggggcaaggtcctcgatgaaagcggcctcggccttcccggcgtggaaatccgggcggcgagcccggccctccaaggcgcccggaccgttttttcgggacgggacggctcgtttcatttccccctcctccccgtcgggacgtattccctgaccttcaagctcgccggcttcaccacgatcgtccaggaggcggccatcgtccggctcggcttgacgacgaccctgaccgtccggatgccccaggcggccttggaaacggaagtcgtcgtcacggccgaaaccccgctgatcgaccggtcctccaccgacacctccacccggctgggggcggccgacctggaaaaaatcccggcccagaaccggacggtcgtggacgtcgtcaagttcacgcccggggcggccggcatccgggccgacacgcggcggggcacgtcgaccgagggtcagcccagcttccgcggggcgggggcggagggcaacaactgggtcatcgacggcctggccgtcagcggagtccggatgaaggattccggggtcaatcttaattacgattcgctcgaggagatccagatcatctccgatccgttctccccagagttcggctcgtcctacggcggcatcatcaacatggtcacgaaaagcgggggaaaccggttccacggcgaagccagcctgctgatcgaaaacaggcatcttcaggcggcccgccaatcccagctttcggtcgtcagcgagccggacgccttcaacaacacgagcgcttatgtcaatctcggcggtccgatcctcaaggacaagctttggttttttctttccaacgattaccagtcgctgaccgaggagacgaaggaggcggccttcggctacctggccgttccgggcggacggagaacgatcggccgcgacaacatcttcgtcaagctgagcttcgcccctcacgccgatcacggcctttccctgacgttcctccgggaccagtcgtttccccagaggggagggatcgggcttcccgagatgaacgaggaaaagcgggtccgggacgccatgttccgcctcaactaccggggcatcctcagcccccggacgtttgtcgaggccggcctgggccgggtccggcgggacctggacacgacgccggtcgacggcgatctcgggccggcgatgtactacgtcaaggacctggcccgcaacgtccataattcctacggcaacgtgatcgatgacgagcggcggttcgacgcccaggtgaagatgaccacctactttgaaacgccgcggttcggccgccacgagatcacggccgggttcgagtactacgacgtgtcttcggatttcgaagtggatttcagcggaaagaacgaggatctcttccccggcaacggcttcgatgtcggcacgaaatacatcttcgaaacccggaagggcggcgtcggggttccgtccggcttctacgagtacgggccgttcgatttaatcaacgcctcgagggggatcggacttttcctgaaggacaaggtttcctgggaccgcttcaccctcatggccggcctccgcgctcaaacccaagcctgcttatccgatacgggggagacgctctggagctggggcctcggggattttctctctccgcgggtgtccttcacggccgatctgaccaaggacggccggaacgtcctcaagctggcctgggggcggttcagcgacatgatcacgacgatggccctcggcttcttcaattccggaatggttccgacctatcgtctataccggtgggccgggccggagtcgcccggcgaggccgacgtccacaatcccgacttctgggccttcgaaatccagcagagccaaaaattcgacatcaatccgcgcctcaagcccgatttccaaacgcgctggcttgtcgaattcgaccgccggatcgggccgtcctgggcggtccgggcccgtttcgtccggaccacggccgacaacctcctcgagctcctgatgatcttcgatccgcggacgatctaccgtttcctctacgacaacttcgaatacaagcgccgggattacaccggattggagctggaaatcaccgggtcgatcggccggcgcctgttcctcaacgcctcctatgcccatgccctggcccggggcacgaatcccggacaatcggagaccggccgatggtccgaggaggaaggcagcacgtattacctggggatgttcggaaaccatatctacgtccccgacatgcccgagctggccgccctgaaggcctgggccgatgccgccctggccgggctgggcggccggaacatcggcgatgagggctggtacgggcgtctcccctattccgtggaccacgacgtcaagctcaacgccgtttacagcgccccggccggcatccaggtcgccgcggccttcgaattcatttccggctacccctgggaaaaaacaggctacgtcccgtttttcggaggatattacgccttcccggaaggccggggcgcgcggaccacgcccgcccattccttcctggacgtttcgatcgagaaatccttcgccctgccgggctcggggatcttcgccgacgcggccgtggccgtccgcctggacgtcttcaacgtcttcaacagccagcggcccgtttcctacgtcaaggaggatacgccgctgttcggcgacgtttggggacgccagcagccgcgccaagcgcgcttgtcggcgaaaatcaagttttaagctttattctacggtcacggacttggccaggttccggggctggtcgacgtccgctccccgcttggccgcgatctggtaagcgaacagttgaaggggaacgaccgccaggaacggggtgaggagagggtgggtcgccggcaaggggatcaccgcgtccacgtgctcccggagggccgcgtcgttttcatcggccgccgcgatgacaaagcccgcccgggccttgatctcggcgatgttgctccgcattttgtcgtagacccggtcgcgggggatcaaagccatcgtcggcatcttctcgtcgatcaaggcgatcggtccatgcttcatctccccgccggcgtaggcttcggcatgaatgtaggagatttccttgagcttgagggcgccttccatggccacggggtaattcacccagcgcccgagatagagaaaatgggaaaaagccatgaattgctgggccaggtcttcgatcgccccggcccgatggaggatccgctcgaccttgtgggggatgcgctggagctccgcgatcaccgcgagccggtcctctttcgttcccgcccccttcgcctgcgccaggccgagggcgaccagggccagggcggtcagctgggcggtgaacgtcttggtcgcggccaccccgatttccgggccggcgtgggtatacagaacgccccgggattcccgggcgatcgatgagctgacggcgttggtgacggccagagtcgcggccgccctccctttcgccgcccggagggcggccagggtatcggcggtttcgcccgactgggaaatgacgatgaccagggcatccttgtcgagaatgaaatcccggtatcggtattccgaggcgtattcgacgtcggccgggatgccggccagagattccaggaagtatttcccgatcaagccggcgtgggaggatgttccacaggcgatgatgaccgccttccggacatcccggaaaacctcggccgggatcccggtctcggccagcaggacctcgccccggtcgagggaaatccggcccatgagggtgtcccggataacctggggctgctcgtagatctccttgagcatgaaatgcttgaaaccctgcttttcgaccatgaggggactccaggagatcctctcgattttcttttcaaccggcgcgcccttgaaatccaggaaacgggggccggaggcatcgatgacggccatctcccggtcctcgaggaaggccacccgggaggtatgggccaggatcggattgatgtccgaggagacgatcgtctcgccgtctcccaagccgatgaccagcggggggcccatcttcgccgcgacgatccggccgggatccttgaccgcgatggctccgacggcgaaggcgccctccatctcggccagggccgcccggacggcctcctccaacgatccggagaaatgcttctcgaccaggtgggcgatgacttcggtgtcggtctccgtccggaagacatgaccctcggccttcagctttgtcttcagggcgagataattctcgatgatgccgttgtggacgacgacgatcccgcccgtgcagtcgacgtggggatgagcgttggcctcgcttgggcacccatgggtcgcccaccgggtatgaccgaggccgtaggcgccctcgatcggcgcgcggcccaggcactcctccagagcggcgaccttgccccggacccggcaaaggcggatgcctccaccgccggcgacggccactccggccgagtcgtatccgcggtattcaagctttttcaagccctcgagcaaaacggggacgacgtctttcgggccgatatacccgacgattccgcacatgcgaacccccttcctcggggcggatcatcccccgcgcgggacggccgcgctaggacttcgatccgccgtttttccccgcctgaagcttcgccctccggaccgccgcccatccgggcttctcgacctgccgggcccgggcgacggccagggcgtcgtcggcgacgtccttggtgatgaccgagccggccgcgacgtaggcgccccgcccgatgcggacgggagcgatgagctcgctgcccgagccgatgaaagccttggccccgatgacggtccgattcttgcggacgccgtcgtaattgcaggtgatcgtcccggcgccgatgttggccgccgcgccgacttcgctgtcgccgagataggacaaatgcatggccttggagcccggaccgaaatccgtctttttcatctcgacgaaattgccgacccgggatccggctcgaagcgaggtctgcatccggatccgggcgaacgggccgattcggacgtcgtcggcgacggtcgcatcctcaatctcgctggagccgaggacatggacattgtcgccgaggacggatcggacgatgcgggcatggggatggatccggctgttgcgtccgatgatcgtcggcccctcgatgaccgccccgggataaatcaccgtctcggccccgacacggacgttccaatcgatccaggtggtcgccgggctcaaaatcgtcactccgtgttccgccaggtcccggatcttgcgcaggcggagccggtcggccgcttgtccaaggtcgaaccgcgtctggatccgacggacatcctcgggctcgggagcaagaacgacgccgaccggatttccgacggcggccagaaggccgaaggcggcggtcaggtcggatccgcctttccggcccgtccgggcggcccggggcagaacccggtcgagcgcgccggcctggaagacaaacacgcctgtcgggacgcggcgcggaatcgccccccggtcctctagaatcggaatccgcgcgcttgagggcggaatttcggcggactcggcccataacatcgtgccggcgtatttcttccggcggtgccgggaaacgagattccggagaacggcgggggggatcagggggaggtcggcggggagaatcaagacgtcggccgcggcgtttccggcccattccttccgggccgattgcacgatcgcggccggattgccggccttcgccttggccgcgacgacctcggcggacagtccgggaatcccggtcttgacggcttcgggatcgagtccggcgacgaccaaccgcttggccccggccccggcggcggccgcggccgcccattcgagaagggtcattcccaggagggaatgaagcgctttcggagtcgtggacttgaatccgccttcgtcttcccctcccgctgaaatcaacccgatcaggaggttatccatgaatctttggggcctgtctcaagacgtcttggtgatggccttgaaccgtttgtcttcccagaggggagcgaagtcgacttcgttttgggccaggatccggtaggctttttcgccggccacggcctggcgaagggcctcgagggattcgtcgagccggccgcgccggcacaggagatcggcctgaaggtagaggaggcgggcgtcggccggatcggacttcagggctttttcgacaagcttcaaggcctcctcggcggccccggtattcattttatagaccgcggcgcggacgtaatcctcggcggtcttgagcgctggaatttcccggggttccttgaagcgctcggcggcgatcgattgataggtccgcgcccgggcgactaggtcgcgttcagccgggaatttctcgatgaatgccccgaatgattcctgggctttgtcccacttcgatttacggaactccttcatggcgtcgccgtaggcggtcaaagctttttggtattcgtcctttttacttttttcttctttcaaagggttctctccggatccaagatggcgtgtattttatccaagatcaagcggaaagacaagagatcccccgcccttcatgatgggattcggccgcgagaagacgggaaaagccgttcgttttcgttacatcgcgtcggaggaaaactcgctttgcggccgacgcccgccgcctcgccggcgtcgagacggaagacaattccggaaaacgtccggcgtttgattattttcggacagcggggtttcggcatccgctattcccccaagaccgtcaattccggatgatcgagaagatgcctgacggcggcgaaatggaggcggtggccggccttgacggcgctcacccgtccggcgagcggacggccgagcaaggcgaggtccccgatcaggtccaggagcttgtggcggacgaattcgtcgggaaaccgcagcggtccgttcatcaccgactcgtcgtccatgaggatcgtattttcggccgaggcgcccagggccaggccccgggaccgcaggctctcggcgtccttgaggaagccgaacgtccgggccggggcgatttcccggacgaacaccccccagcggatcggccgccgcagcgtctgcccgccgatggccgggtgagggtaatcgatggtgtaggacagctcgagcccgccgtcctcgatcggaggggcaaagtcgatcgccgcgccctcgtcggcgagggcaaacggccggacgatcctcaggaagggctggaaatcgggcagcctctcgatcccggccgtctggagagccagggcgaacggctcggcgctgccgtccatgatcgggatctcatccgcgtcgagctcgatcgtcaggctgtcgatgccgggaacccacagggcggccaggagatgctcgacggtccggacgcggaaacggtcgccgaccaaagtggtgctgttctgggaatcgattcggccggtggtcaggggcagctcggcgttatccaaatcggtccggcggaagatgattcccgggatcgacgacggcagaaggcggaggcggacggatcggccggaatggacaccgacgccttcaaaaaagacaggggcagccagtgttttggaacgggtcattatttctctcgtaaggacattctatcatggatttcccgagagggagagaccagggcccgttctcctcgcttcttttcgccggtttcgtcgttttccgcccgaaggacgacgggaaatcggagtcttgccgggacaagtattctgtctccctgttttttgctaaaatccggagtatgaaaacccagatcgaagatctcctgacgaaggtccgccggggaaccctgaccccgaggaaagccctggccgcgctgaaggattatccgtttcaggacctgggcttcgccaaggtggatcaccaccgggaaatccgtaaaggataccccgaaatcgtctacggcctgggaaaaacggacagccagatcgtcaaaatcgccgcagccatcgtccaaaaaggcagcaaccttctgatcacccgggtggaggcatccacttacgccgcggtcaaggaagccgtccccaaggccgcttacaatgccctgggaaaaatcatttatctgaggaagcgcccggctcctcccggccggggaatgatcgccgtcttgacggccgggacgtcggatattccggtcgccgaggaggccgcggtcacctgccgcatgctcggcaaccgggtgcagcggttttacgacgtcggcgtggccggcctgcaccgccttctgagcgaatacggccggctaaagaaagcccgggtcatcatcgtctgcgcgggcatggagggcgccctccccagcgtggtcgccggcctgttctccgtccccatcgtcgccgttccgacgagcgtcggatacggggccagcttcaagggcgtggccgcccttctggccatgcttaattcctgtccggggggcgtcggcgtggtcaacatcgacaacggattcggggcggcctacttggccagcctgatcaatcgctagcttgacaatccgtaggccggaccttatatttacaaaaaattcgcgaaattattctttcattgaaggcggccgtcttttaaaatggagattctcgaccaggtccggaacgcggccaatatcgttgaaatcgccggccagtacacggccctgagacaacgcggcaaaaaacacgtcggtctctgcccctttcactccgaaaaaacgccgtctttcaccgtcgacgccgacaagggtctttaccactgtttcggctgcggggccggcggggacatcttcaccctggtgatggagaaggagaatctcgacttcccggaagccatcgccttcctggccgagaaataccacatccccctccccgaaaagaaacgtctctcgccccaagccctcaagctcgaggaacaaatccggaaggtcctggagggagccctatccttcttccggaaaagcctccgggaaacagccgaggggaaaaaagccctggaatacctcaggggccgggggctgtccgccgctgtcatcgaggaattcgccttgggatacgcccccaattcctgggacgccctgatcaaatacttcaaggccaaaggcgtcgccccggccctgctggagaaagccggcctggtcgttcccgggcggaagcagggcgaattctacgaccggttccggggacgggcgatcttcccgattttcaccgtcaccgggaaagccgtcgctttcggcgggcggtcccttttcggccaggatccgaaatatctcaattcacccgatacgcccttatattcaaaagggcacctgctttacggactgaacgtcacgaaggacgccatccgggaggccggggagtttatcctggtcgagggatacaccgattttctcagcctttaccaagccggacgccggaacgtggtcgcttccctggggacggccctcacctcccgccaggtcgggttggcgatgcgtttcgccccgaaagccgttattaattacgacggcgacccggccggacggacggccgctttccgagcggtcccgctgttcttcgaaaagggcgtggaaacccgcgttctcatcctcccggagaatctcgatcccgatggcttcctccggaagaacggagcggccgcctacgaccttctttaccccggggccgccccgggcctgaaattcatcatcgattacctctcccgagagaaacgcctggatgtccccgaagtcaagacgcgggtcctccgggcggtgatggacatcgtcgaagccgtcccggacgcgatcgtccggtcggaatacttccgccttacggctgaacatctcggagtggatgagtcccttcttcgttccttgtcccaggtaaagccgggcgaggcggccgcccggccggcggagacattccttcccgccgagaagcggcttctccaaatcttgatggaaaacgccgatctccggcctgatatcttctccgagctctgcgaggaagacatcgccggcttgaaaagcgagccgatttttgccataatgttgcgcttattcgcaaatgaacaggatttttccctgaacgagatgcataagagcgtcgagccggggctcgcccgggagttgtcccaggctctcctcgaaaggcgcgaagcgccgagcctccaggaagcgctcgattgcctctgggccctccgagtcgccggcaaggagaacgctcttcgaaaaatccaaggggagatcgcccgggcggaaaaatcgggcgatcgggagaagctggagtccttgatgagccggaagctggacctgacccgccaggtcctggctttgagatgaaaacgcccatcgatcccccggcggggggcgtaaaacggcggccgacgaaaaacctcggacgccaaggagccgcgcgtggccgctgacaacaagttcccgaaagacgaaatttcagagctgatttccaagggacgccggcagggattcctgctgtacgaggacatcgacaagacgttccaagacgacttggaccacggcgccaatttcgacgacttcctttcttccatcgacgactacgggatcaagatcctcgataccaagggcagcgagctggtgccccgccggaggaaaaacgaggtcgtctccacccaggggctcgagcggacgaccgacccggtcaagctgtatctccgggagatgggcaacatctcgctcctgacccgggagggcgagatcgccatcgcccgggaaatcgagcgcggggaaaaggccatcgtcaaagccctgtccaagacccgcctcgtcctcaacgaggtcttggccctcgaggaaaagatcaagatcgatccgatgatcatcaccgaggtcttcgacgtcagcgaagacgacgtggccgagggcaaactcgaggaaaagaagaagttcatcctggccaagatcaaaaaaatcaaggatctcggccgcaagctcgacaagatccccaacaccaagcggatggtcttcacccgctcccggatcatcgtcgcgatgagctcgcagatccgcgatctgaatatgcgcgcgatccagcaggagcggatcatcgaaatcctccgggcccggctccggatcatcaacgatctggaagaacgccgggaagagctcgaagccctccggaacaaaacccggaagaagaaaacggcccaggacctcgaaccgcagatcaaggagatcgcgaaaaacctccgggcggcccagaaggacatcggcctggacgccccccatctccgccggatcatccgggcgatcacgaccggtaaaaagatcagcgaccaggccaagaaagaactggtcgcggccaacctccgcctggtcgtctcgatcgccaaaaaatacagcaaccggggcctccagttcctggatctcatccaggaaggcaacatgggcttgatgaaggccgtggacaagttcgagtaccggcgcggctacaagttctcgacctacgcgacctggtggatccggcaggccatcacccgggccatcgccgaccaggcccggaccatccgcatcccggtccacatgatcgagacgatcaacaagctcattcgcatcagccgccagctcgtccaggaaatcggccgcgagccgaccagcgaggaaatcgccagaaagatggacatgcccgtcggcaaggtccggaaaatcatcaagatcgcccaggagccgatctccctggaaacgcccatcggggaggaagaggacagccacttgggggacttcatcgaggacaaggtcatgccctcgcccccggacgcggtcatccacatcaacctccgggagcagatcgaggaagccttgaaaagcctgaccgaacgggaggcgaaggttctgaaaatgcggttcggcctcggcgacggcaacgaacatacgctggaagaagtcgggcagcagttcaaggtcacccgcgagcgcatccgccagatcgaagccaaagccctccggaagcttaaacaccccagccggtcgaaaaaactccggtcgttcaccaacggcttcgggtgagtccggccgaagcccgccgccggggcggccccgggcctccccctcccgggggcgcaaaattccgttgcgtcccatcggcaattttgatataaaatcccaaagggcctatagctcagcggaagagctcccggctcataaccggtctgtcccaggttcgaatcctggtaggcccatttgatcgcgaggacccggtggatatttcgtttgataagctcatcaagcttcagaaaatcgattccgaaatcatcagcgtcaacgcccatctcgactcgatcccggatcaaatcgaggcgatcgacgaggacatcaaggcgacggcggttctcgtctcgggggcccgggacaagctggcggccaaccagaagaagcgccgggagctcgaaggcgaggtgaagggcattcgggaacaaacggccaaattcaagcgccaactgaacgacgtcaagaccaacaaggaatattccgccctcctcaaggaaatcgaggaaacggaccagaagatcgcccggatcgaggaggagattctcaacgagatgatcgccgccgacgacatcgaaaaggagatcaaggcggctctgaaaaagcagggggaggaagagggcaagctcaagatcgagcgcgaccaggccctggccgaacagaaggaaatcgagaagaagaaagaccggctggaaaaagaccggagcgcgcttctccccgcgattccggccgaacagctgtcgatataccagcggatcgccaagaagacggccggcgtcgccctctcccccgtcaccgacgatttctgctcgatctgccagctccgcatccggccccagatcctcgacgatctttgggccatgaacgaaatcatcacctgcgaagcctgcggccggattctttaccaccgaaagccggcggatccgcccgactccgatccggagaaagaaaccggctgattccccggctccatccgccggacgaatcgttttccgccgccgttcctcagtacgcgtcgtctttgtacaaatcctcgatcatttcctggtagcggctctcgatgatgttccgcttgaccttgagggtcggcgtgatctcgccctgggcgatgtcgaattcgcggtccaggagggcgattttcttgatccgctcataggaggccaggttcggcgtggcccgttcgatctccgaccggatgaagttgacgatttgctcgttgcggatcaggtcctcccggtcccggtaggagatcttgaagaatttcgcgtactcctcgatcttctcaaaattgggaacgatcaaggcggtgacgtagcggcggcggtcgccgatgacgaccgcgttcgtgatgtagggattcgtcttcaggatgttctcgatgggttggggggcgatgttcttgccgccggccgtgacgatcaggtcctttttccggtcggtgatcgtcaggaatccgtcggcgtcgaggaacccgatgtcgcccgtcttgagccagccgtcctcgaacacgtcccgcgtttcatcgggcttcttgtaatagcccttcatgatgttgggccccttggccgagatctccccgtcgggggcgatccggatctcgacgcccggcagaacgcgccccacggtcccgaacctcagggcgtcgaaggtattcacggccaggaccggggatgtctccgtcaggccgtatccctccaagatcgtcaggccgatggcgtagaagaactcggcgatgtccttggacagcggcgcgcctccggagacgaagaaccggacccggccgcccgtcttatccaggattttcgaaaagacgagcttgcgggccagggcgagcttgagccctaacagcggcccggcggttttgccggccagctttttctccccggcggccttgcccgcgccgatgccccagaagaagatcttccgcttcaagcccgggctcgagaggacttggtccatgacccgcgaatagatcttttcgaaaacccgggggacgctgaccatgacctgcggccggatctcgagcaggttgtgggcgaccgtctcgacgttctccgcgtaagcgatcgagcaccccttataaagataagtgaacgagaccatccgctcgagaacgtgggacaggggaagaaaggacagggccgtgtcggcggcggaaaactcgatgatccccgagaccgccaggacgttgctgacgaaattggcgtgggtgaggatcacgcccttggggacgccggtcgttccgctggtgtaaataatcgaggcctcgtcgtccggctgaacggcccgggcggtttcctcgaacaggccgggacgagcggcctccagggccgcgccgcgggcctgaacggcggccaggggaagcacgtcgggagcgggggcctgcggctggaagatcacgacatgcttcacccgcggaaggtcccgccggagggccgcgattttctggtactggtagaagttggagacgaccacgatctcggcgtcgctgtcctcgatgatgtacttgacttggtcgcccgtgagcgtcgtgtagatcggcacggtgactccgccgaggcagaggttggcgagatcggtgatcgtccattccggacggttctcggacaggatgacaagcttggctcccggacggtgccccagatccttcaagccgagggccaggttccggacggcggactcgaattcggacgttgagatgtcgctgtagacgtcgttgcgcttcaccttcatcaggtccggtttgacgtagctccggaccgtattcaaaaaaatctcgggcagggtcttcggcatcttgtcctccacgatttctgcgaacgaatgcgcccattctatggaaaaagacaggcagggtcaacccaaaattacgaaaggaccgtccggcgccgcggcgcgtctctattttttcagggccgcttccaccgtccaccggatcttctcataatcgaaagcggccaaggcgtattccttgaccgcgccggcgagatcatccttcgcccgggcggcatcgccgcgggtcgaccgggactgggcttcctggaagagcggatccgccgggacgtttttccaggcctccaaggcgttttccctcagccggtcgacgagcttcgccagctcgcgccagcgggccgggtcgcgtttttcggtcacgcataagcggaacatcttttccgagatcgtgaaagaacatcgggcgtcggtccccttcccggcgcccgcggccgacgcgcctttttctcgaagcatttcagcggcctcgaaaaacgcggatcccgatccgtggccctgtttgacggcgagactccgggccccggtcatccgggccagggccatgtcgaccgctttctgttcctcaggcgccaggggcgacacggccggcggtttcgccggcggcgcggcgcttctggatccggaggaaaccggcttcggaatctgagggctcttgaccgtttcgggcggggcgggccgagactccgtcgtccgggtttccgtcgccgcctccttcatgacgaccgagggaaacgggtcgcccgggagagccgccgaagatccggtatccgccgccgtctccgatgccggaacaggcggagcgccgggcttcgagaaaatgaaatagacggccgcggccgcgatgaccaccccggccgcgatcagcggaaccggaattttccttgctccgggcgcgaccggcgtcttcgccgccgccgcgcccgccggggcgggccattcggccgtcgggatgtcccggccggcgtcctccaaggccgctttcagctcttcggccgacggataccgcttggccgggtccttttccagacaccgggcgatgaccgcggccagcccggccggaacttgggcgttccattcccggacgttccggggaacctccatcttgtgcttcatcgccaggctgaggggcgtggctccttcaaacggcactcttccggtcaccatttcgaagaggacgacgcccagcgaatagatgtccgagcgggcgtcgacctcgcccagctcggcctgctcgggagacatgtattcgggcgtcccgatcatcaccccggacccggtcacccgctccatctcggtgaaccgggcgatgccgaagtccatgatcttggcgttgccgtcggcgtcgatcatgatgttctggggcttgagatcgcgatggatcgctccgatccgatgggcctcggccagtccgtcgcagatctggccggcgatcatcaccgccttcccggcgttgagcggtccggcccgcctgacaaaccgcttcaggtcctcgccggcgacatactccatcgtgatgtagtaaaggaagtcctcctctcccaggtcgtacatccggcagatgcggcggtgggtgatccgccgggtgaatttcaactcgttcttgaaccgttcgatggccttctcctgggcgctgatctccggccggatgagcttgagggcgatcacctcgctgatcttgtgatcataagccttgaacaccttccccatccctccgcggccgagctcctcgatgatctcgtagcggccggccagccggtttccccgggccagctccacggtcgaggcccggaccgtccgcggtccatcgggggcggcctcgaggggagctccggtgtcctggaggggggtcgcgcagttgccgcagaaccggctggaagccgcgttttccgcgcggcaagccgggcagatccggacggcttccgtcttcgaggccgggccgggggttcggcccgccccggttcctttcgtcttttttttcgtgtcggaagcggtcatggggcaccttccttcccggccggccggccccccttccagccgcggacgacatacgccttgatcggaccttcatgcttggtctcgacctcgaggggcggatgctcgacgtcgaggcagtaatgcagccgctggtagatctcggggctgacgagaatcgtccccggagcggccgcgtcgcaataccgcgaggtaaggttgatcgtgttgccgacgaccgtgtattccatccgctcgggcgcgccgatgaagccgtggatggccggcccggtgtggacggcgacgccgatgcgaaacggcgcccggcccttccagcgcttggtttccagcctccggacggcctcctgcatttccagggcggcctggacggcccgctcggcttgctgttcgtcgggctcggggcatccgaaaaccgccaggatcgcatccccgatgtacttgtccaccgtcccgttgtgcttgaggatgatcggggtcaattcgtggaacatgtcgttgagcatccggacgacggcttccggctccatggccgcggccagcttggtgaatccgcgcacgtccgagatgaggacggtcacccggtcgaggcgctcggaggggacggcggtgtgatccgggagccgggccaggcgctcggcgatggagggcgggaactgggccaggaggcgggtcttgatcgccgcctcgcgctgaaggacctggccgagctggagattcttgatgaacatggccgtctgggcggccatcagctggacaagccgcaggtcgtcccggccgaaggttttcgtcccggacgtcaaatcgaaataaacgacaccgtagacttctcccgcccaggccaagggggcatagagggccgaggtcgtcccggaggccatcaggctcatcgacggatcgacctctccggccgcccccaggcgccaaaggcaggccttcttctcggaaaagacgtggcggcccagggtcaggctgcaggtcggaggatcggtttcggggcggtaggccttgaggatcagctccggtcccatcaggagcccgctgtgagtgttcgggccgaacgaggcgaaagcccggtgaagatgctccaggaggtgggaggccagggtttcgacggagtcgatcccgcttagggcggccgtgagatcaaaaacggccgtcagccgttctcggacggcctcggccgtcgctccccccaggacgaggttggggacggattcatccccggcgagggcctcggccggcggctggaaaggcaggggtgttttccctttcggcggaaacggcgggggagccggggcggccgaagggacggccgccaggcgcagggtggtccggccgagccggacgatcgaggcgggatcaagaagcgtccgggtctggatccgcttcccgtcgacccaggttccgttggcgctttgaagatcctcgatccagacgccgccgtcatccagggtgagacgggcgtgccgggcggagaccatctcgtcctccaggctccagtgatccggccccggcggaaggcggcggccgacgaggacgacgcccgaaacggcgcggaacggtgttttcgacccggagggcagggtcgccagaaacgagaatcctttccgcccggtcggcgccaagcgttctccttcctctgatccggggacgatcttccgcccggaggagcgtctccgatgatgcggtttttataactccgaatggaggaaaaagtcaaaatccggtccgcgggggagggacgtctcggcgccgggaaatccccccgccgccggaggattcaatctgtttcgcgggccttggccacggcgcagacggcgtcgttttcctcaagattgatcaggcggacgccctgggtggcccggccggtcgagcggatctgctcggttttgatccggatgaccttgcccgagacggtgacgaccaggaggtcgtcttccgcgacgcccaggacggcgatggccttgccgatcttgggcgtgatcttgaggttgatgagccccttgccgccgcggtgctggatgcggtaggaggcggcctccgttctcttgccgtagcctttctcgctggccgtgaaaatgtacttgtcctcgtcgccgacggccacgaagccgatgatctcgtccttcttggccagggtcatcgcccggacgccggcggcggtccggcccatcggccggatgtccttctccttgaaccggatggccttgcccagccgggtcgcgagcacgaggtcccgcttgccgtccgtcagccgggtccacatgagctccttcttcggccggagattcatggcgatgatcccgccgcggcggatgttcttgaactcgctcagccgggtcttcttgatctggccgtcggtggccagcatgaccacgtagtggtcctcggaaaaatccttgatcgacacgaccgaggtcgcccgctcgttggactggaactcgaggaggttggcgatggctttgccgcgcccggccacgccgacatcggggatttcgagggccttgagccagtacatccggccgatgttcgtgaagaccaggaggtaggagtgggtcgagcagacgaaaacgtcatcgacgacgtcctcggccttcatgctgattcccttgcgccccttccccccgcgcatctggaaccggtaggaggagagggaggtccgcttgatgtagcccgactgggtcgtcatgacgacgacatcctcctccttgatcaggtcctcggcccggatatcggtcacaacctcgtcccgcagctcggtccggcgggcgtcggcgtaggtctccttgatctccttcatctccccggcgatgatctcggtcacgagcttgtccgaggagaggattttcttgagcttgacgatcagggccttgacctcggtgtattcctggacgatcttctcccgctcgaggtgggtcaagcgctggagctggatctcgagaatggcctgggcctggatctgggacagcttgaacttttccatcagcccggcccgggccgcgtccacggtcggggccgaccggatgagcttgatgatcgcgtcgagatgatcgagggcgatcgtcaggccttccaggatgtgagcccggtgctcggccttcttcaggtcgaaccgggtccgccgccggacgatatcctgccggtggccgatgaaatacttcatcatgtcgatcaggccgaggatcttcggctgcttgtcgacgatggccagcatgatgatcccgaacgacgtctggagcgacgtgtgcttgtagaggttgttcaggacgacctcgggaagctcgccccgcttgacctcgacgacgatccggatgccttcccggtcggattcgtcccggaggtcggcgatgccctcgattttcttcgcgttgacaaggtcggcgatgctctcgatgagccgggctttgttgaccgcgtaggggatctcggtgatgacgatccgctcccgttcgcccttgtcgccccgctcgatcgtcgtcttggcccggacttggatggtgccccgcccggaggtgtaggcgtcccggatgccctgctggttgaagacgtatccgccggtggggaaatccggcccggggacaagcttcatgatgtcttcgagcgaggcgtcgggatgatccaggaggtggacgatgccgttggagatctcgcccaggttatggggcgggatgttggtggccatgccgacggcgattcccgagcttccgttgaccaggaggttggggaacttggtcggcaggacctcgggcatggtcaggctttcatcgtagttggggatgaagttgaccgtgtccttctcgatgtcggccagcatctcgccggccagcttggtcatccggacctcggtgtagcgcatggccgccggcggatcgccgtcgatcgagccgaagttgccctggccgtcgacgagcagggcccggagcgagaaatcctgggccatccggacgagggtgtcgtagacggcctggtcgccgtgaggatgatattttccgatgacgtcgccgacgatccgggccgatttcttgtgaggcttattgtaaaccgtgcccgtttcgtacatcgcgtaaaggacacgccggtggacgggcttaagcccgtccttgatgtcggggatggcccggccgatgatgacgctcatggcgtaatcgaggtaggagcgcttcatctcctcctcgagggcgacgttggacagctcggccgcggccggaaagagcggctgttgggcggacggagctttttcccgggccggcgttttttcggccggggcgtctccgcccgggacggcggaagccgggatctccggctccgggacaggcggcggaaccggggtttttccccggcctccgcggccgcctttggccgcgatcttgggcttggttttttctctctctttctctttttctttttcttttttagccatgggttaaatgtccaggttggtgacgtgggccgcgttggtctcgatgaagttgcggcggcgttcgacttcatcgcccatcaggatcgtaaagacctcgtcggcggtcacggcgtcggtgatcgagacgcggaggagagcccggttctccgggttcatcgtcgtcgaccagagctgttcgggggccatttcgcccaaccccttgtagcgctggatggagacgccttttttccccttctcatggaggtactcgaggagcttggtctcgttctcgacgacgatgcactcgccgttggacaggacctcgaacggcgccttgaaatcggccagctcctggaaaatcttgaaaagggccttgtactcggccgagtcgatcaggttccagttgaccttgcagacgaccgtcatcccgttgacgccgaatttcacggccagctcccaggcgtcgtattcctcgtcgtgggtcatttcgacgtccaggtcgtattccttttggaggagggattggaggcgcttgaccgccttcttgtcctggagaaactccaagccgttgacgccctcgtggatgagccgctcgagaaggaagaagggatacgattttctctccaggagctggatgtaattcctcttctgcatgatccgaaggaagagcttgcggaatttctcgccctcgaaaatttccttggcgcccttgacccgaatcttgaattcctcggagatcttcttgacgatccacttttcgtacgcccgctcctctttcaagtaggtgacctccttgccccggacgatcttgtacaggggcggctgggcgatgaaaaggtggccttcctcgatcaacgatttcatgtggcggtagaagaacgtcatgagaagcgtccggatgtgggagccgtccacgtccgcgtcggtcatgatgatgaccttgtggtagcggagcttctccaggctcgattcctcctcgcccagggtcgtgcccagggcggcgatcatcgtcccgatctcgtcgttgttgaagatcttgtcctgccgggctttccagacgttgaggatcttgcccttcaggggaagaatggcctggaagcggcggtcgcggccctgcttggccgagccgccggccgaatccccctcgaccaggaagatctcggccagggccggatcgcgctcctggcagtcggccagcttgccggggagggacgaggattccaggacgctcttgcgccgggccaggtcgcgggccttgcgggcggcttccctggcccgggcggcctcgacggccttgaggatgatccgcttggcgttggtcggattttcctcgaggtaggcgcccaactgctcgttgaccagcgattcgacgatgcctttgacctcggaattgcccagcttggtcttggtctggccctcgaactgggggtcgcgcattttgacgctgagaacggcgcacagcccctcccgggcgtcgtcgccgccgagcgagccggctccgaggtccttcaggaggttatgcgattcggcgtaggaattgagacagcgggtcagggcggatttaaagccgatcaggtgagtgccgccctcgtgggtgttgatgttgttgacgaaggagaaaatcgtctcgctgtagccggagttgtactggaaagccagctcgacgatgacgtcgtccttcttcgactcgaagaagatcgggcgcggattgaggacgtttttgttctggttgaggaactgaacgaattcgacgattccgcccttgtactggaattcatggctcttggaaatccgctcgtccgtgatcgagatgcggatgccccggttgaggaaggacagctcccggaggcgctgggtcaggatttcgaagctgaactccgtcgaatcgaagatctcgtcatcgggccagaacgtgatcttggtcccggttttctttgtcttgccgacctgcttgaggcgggccacggcaacgccgcgttcgtagctctggacgaagatgccgccgtcccgcttgatttccaggtccaggcgccgggacaaggcgttgacgaccgagacgccgacaccgtggagtccgccggagaccttgtaggacttgttgtcgaatttgccgccggcgtgaaggatggtcatgaccacttcggccgccgacttcttttctttcgagtgcatggccaccgggatgccgcgaccgtcgtcgaggatggtcaccgagtcgtccacgtggatgaagacctcgatgtccttgcagacgccggccaaggcctcatcgatggagttgtcgacgacttcgtaaaccaggtgatggaggccctcggagccggtgcttccgatgtacatcgcgggccgtttccggaccgcttcgaggcctttgaggaccttgatgctttccgccgaatacttctcttttgtcatttgattctatctcattgaattcaagtgagttataagtgtattgctcttaaaaaaacgccgcggatttcatgtctgaattataccctgaatcgagggaaaaagtaaagcgaaattttcgatcaaaaacacaatattttggggcggaggggaggatccggcccaaggccttgggagaaccgggcggaacggaggggaggctttttccacggttcttttccaactcggaaaagaggggaaaaaccggggaaacgggtcacgaaaaggcggcgattttggtataatcgcggcggagagaaaccgatggcggccaacctcacgcctcaatacctggaagccgaaaaacggtaccgcgaggcgaagaccgtttccgaaaaaatcgagtccctggaggagatgctccgcctcatcccgaagcacaaggccacggagaagatgcaggcccagcacaaggccaagctggccaagctgcgggaagaagcccagaaggccggatccggaaaacacgggctgtccgtcctgatcgaaaaacaaggcgccgggcaggtcgtgttcgtcgggccgccgaattccggaaaatcgagcctcatcaaagccttgacgggggccgatccggaaatcggagattatcccttcaccacccgggccgccgccccctacatgatgcggttcgagaacatcaagatccaattgatcgacctgccgccggtttcggccgaatacctggagagcgggcagatcgagatgatcaaggtcgccgacgcggcctgcgtcgtcgccgacgcggccgatccggaatcgccggggtcgctcgaaaccgttttcagccggctgacggagaagcgcatcgcgttcgtccgggacggattcgtcccgccggcggaagaagcggtccggctcttccgaaaaaaaacgatcctggccgcggcgaaaacggacctcgagggagccggggacgggcttgaggccctgcgattcttcttcgaggcccagcttccggtcctgccggtgtcggccgagaggggcgacggcctcgaggatctgcgccggaggattttcgacctgctccacgtcatccgggtctacagcaaggtccccggcaagaaagccgagttcgagtcgccgttcatcctcccccgccgaagcgacgtcatgcggatcgcctcggccgtccacaaggatttcgtcgagaagctcgcctacgcccgcctctggcggggaaacgaaatcaccgggatgatggtcaaccgcgacttcgccctcgaggacggcgacatcgtcgagctccacctctaaaaagaaaacgggccgatcggcctcgatgctttccgccggttgacattccctgattcccgccctatttttatcagcagacaagggaaaagatccgggcggcgggctttcgaagagccaaaccctctcttctcaggagaaggggttctccctccgggccgaggggatcactttctgccttaaaagaggatttgactgatgatgacctcaagccgggggatcgtcggccagccttgattttcccgcccggttcggcttttttcccttccttaagccgtcgccttccgtgcgaatgaccgtcctcgccataaaggataaggaggaaaacatgaagttcaaaagcctgatgatcatcaagtccgccgtctgcctgggattcgcgccgccgatgctttttttcccggcctggctgctcgggcttttcgggctggcgttcggaacgggcgcggccctgaccgcccgggaatacggggcggccttggccggcaacatgctcctggcttggctggcccggaatgtcgaggaagggcgggcccggaaggcgatctgctggaacctctgcgtctacgacgcgatcggcctcatcgccaccctggtcttgctcttcaacaagacgctgaatccgctcggctgggggatcgcggcgatctacttgttcttcgccgccggcttcggctatttccttctccctcggaaaaaagccgcctgacaaaaaaagaaaaccccgtccctatttttcggcgacgcggaagttgacggcttcctcgtcggcgatgtccatgatcgccatgaagaagagccgggccatgtcctccatcgtctcggagtcgatcagctcaatccggtccttcgtgttgtgatacgtcgggtacggcgcgttcttgccgtaggccccgaaggtcagggacgggacgccggcccagaagaaccaggccgaatcctgccgcggacgggccgggtacgccgcctcgccgccgccgatgatccggtggacgtacttctggttggcccgctcgatgaacgcccagaaatccgcgtacgtcttggcccccgaggcggagatcttgtccccgccgcccggcccctccatgttgatgaagaccagggttttgtccagggggaacaacgggtgttccacgtaatatttcgatccggccacgccctgctcctcgctgccgaagaaattgaagacgaccgtccgcttcggcttgatcgccgacttggccatggcctcggccacgcccaggccgacggccacggccgtggcattatcgtcggcccccggcatgagctcccacatccggcccaggtggtcgaggtgtccgccgatcaggatgacttcctcccggagcttcggatcggtcccggggatgaccccgatgacgttatacccgacgccctcgggatgatgctcggtcacgttcttgatcgtcatcgtcttgccggtggcgaaggatcggggcttgagctccttgcgaatccgggcgatcgtctcggcgtacgtccgtcccgtcccggcgaagacgtcggccacgaccgccgccccgacgtgatggtagatgaatccctcgcggtaggagttgttgggattgccgatcggcccgtagttgtagatcattcccttggccccgtggtcgaaggcgttctcgagcttgtactggtggaaggagtacggccgccattttgggaaggcgccggccggatcgcccggccggaccgggacctccggatccatcaggacgatcttccccttgacgtccaggccggcgtaatcgtcgtagcccagctccggggcggtgatcccgtagccgacgaagacgacctcggccgtcacctcgcccgaggccgaggttccgccggggatgaactcctcctcgaacttatagaactttttgactgttccgtccttgaccggaagatgaaggacgcacgtcccgcccggaaagaccagggtgtagggattcgggaacttctggagatatgtgccgtcgtccccgcccggggcaacgccccatttcttcatgagtgaaatcacccaatcggcgcaggcgtcgtactcggccgttccggtcaagcggccgccgtatgtctccgacgtcagctccttgacgtattcgaacagggtctcgcttcggatcaagcgcgtcgcctccagcagcttctgctcgtcagtgagcggcgcggcggccgcccccggatattgggccgcggcggatgcggccaagatcgaggcgaggatcggaagaaccagaagattttttatacgcggcataacggacctccttcgcgcattcccggccaggatatcacgaggcgccggaggcgcgcaaaagatccgcctgggatcgcctcctcgccgggtcgtttgcgccgggccggtaaatccgctatcatcgtttttcggattcccggcggcggccgctttccttcggaccggcgccggcggcccgatccctgaggaggttcacatgagaacgatgctccccgcgttcctcagcctggccggcgtcttcttcgccttcgccctggccgcggccgaggccgccccggccggaccggtcgcggtcgtgatgaaaacgagccagggggatatcaccctcgagctcgattctgagaaagccccccgcaccgtcgccaacttcctttcttatgtcgacgccaagttttacgacgggacgatttttcaccgggtcattcagaatttcatgatccagggcggaggacaccggcccgacatggcccagaaagtctccaagccgccgattaaaaacgaatccggcaacggattgactaacgcccgcggaaccatcgccatggcccgggaagcggccctccacagcgccacctgccagttctacatcaacaccgtggacaacttcagcttggaccagcatcaatactgcgtcttcggccgggtcgtcgccggtttggacgtcgtggacgccatcgccgcggttccgacctcgactcaaatgggatacgacgacgtcccgcgcgtcccggtggtcattctttcggtccggcgggcggccgcccgatagatacgcctcaggatcatccgtcatgggccggacgatcatcgccctcgtccacctcggactattcgccggcctggtgatttacggatttgtcctcctcgccggaggccggatcaaccggggactcaccgtcctcggtctcatgggcgcctattacgcgctcgtcctccacaaggccgtcctggccgagatcgaacgcaagcgccgcttgagaaaagaaaacaagacaaggagcatgaaatgaaaactcttcgaccgatcgtttgcgccgtcctgatgctcgccgtcgccctggcggccggggcccaggacaagcccaagctcgatcccggcgtggccaaagccctggccggcatccgcggctcggaggcctacgcctatgtcgagcggatggcctcgcccgaattcgccggccgctacaccggccacgaaggctacaccgcggccgcccgctgggccgccgggctgttcaaaaaatggggcctcaagcccgtcgatccgaagaccggctatctcctgccctatccctcgccctatacggtcatccgcgcggccgagatgacgctggtcgccccggacggaaaaaccgagacgaagctcgagccgaacgtcgattttctcccgcttttctacactgacgcgggaagcgccgaggccgggatggtgttcgccggctgggggatctcggcccccgagctgaattacgacgattacgccggcctggacgtcgcgggcaaattcgtcctttgcttccgcggccagcccgaccggaccgacacgcggttctaccactatgacgagcaccgcacccggatgaagacggccaaggacaagggcgccgtcggcttgatctacatctacccctcgcccatttccaaccccaatggcgagtggcagaaggatttcttcccggccatgatcagcgagaaaatcggcgacgcgattctcaacgaaatcgggagcaccagcgccgagctcaagaaagccctgaccgcctttaagcggccgatcggctttcccctcaaatccgtgatccggacgaaagtcgaggccgattatcatccggacggcatcgggtacaatatcgccggctacgtcgaaggctccgatcccgcactccgccgggacgtcctcgtgatcggcgggcatttcgaccacaacggcctgcacatgggcttcctttaccccggggcggacgacaacgccagcggcagtgccacggtgatggagatcgcccgggccttcgccggactggcccgcaaacccaagcgctcggtcgtcttcgtcctgttcggcggggaggaaatgggcctccagggctcgatctattacgccgatcatccgccggcggtcttcccgaagatcgacgcgatgttcaattacgacatgaccggcgcgggcgacggggcgtggggcagcacgaccgaggaaaacctgcggaaggtcttcctcgaagccgatcggcacgtcgggatcctccgcggcatgcgcgtcgtccaaggaccgcccggcgtccggggctccgatcaagcctccttcaggatcaagggcatccccgtcgcctcggtcggggccaacggtccctctttggcctaccacgagacgggagacactatttaccggatcaatccctccattatgggcgatatcgccaagctctcgttcctggccgctcatgcctgggccgaccggtaaagtgaaacccggaaccgccggttttcgttctaggaaaggacggccccccggccgcgccggccgggaaggccgtctcgatccggcatgagacgaaagaggccgcgcggcgaacccgacgtttttctcccgccgctttccggtccgaatccgctggctccgcggcggccgccgcggaaaaagcggcccgccggacggccgctccgggtcgcggccgcggccgccctcgtcgtcctcctgatcgccgccgccgtcctggttttccgtcccttcggtccaggccgggaaatcgtcccggcggtcgactcggccgagagcctccagccggccgagccgggcccgacgacggttgaggaagtcatccttccaggcgagacgctttcggaaattttaggaaacgaaggcctctcgcccgctcaaatcgacgccctggtccgccaggtccggccggttttcaacttggcccggatcgtctccggacggacggtcaagatgacgttcgccccctcgggcgagcttctgtccctggattacccgatcgatgaaagccaattcctcctggtgacccgaaccggggaggggtatgccgccgagaaaaaagcctacgcttacgaaacccgccccgtctacgtccacggcgtcatcgacgagcatctttacggcgcggtcctggccgggggcgaaaaggccggcctggcgatcgagcttgagcagattttcggctgggacgtcgatttttacgccgggctgcggacgggcgacgccttccgcgttctcgtcgaaaaaaaatacctcgacggccgcttccagcgctacggggacatcctggccgccgaattttggaacgacgggcggagaatcgaggcctgccggtttgactacgaggaggggggaagcctcaagagcgggtacttccaccccgacgggcgatcgctccgcaaggagttcctcaagtcgccgctgcagagctaccggatcacctcgcgcttttcctcccgccgcctccacccggtccgaaaggtcttccgggctcattacggcgtcgattacgccgccccggtcggcacgcccgttttcgccacggccgacggccgggtcgaggaggccggctggaagggcggggccggccggatgatccgcttgagccataaaaacggctacgagacgatttacatgcatttgtcgacgatcctggtacgggccggccagagggtcgagggaggacagcggatcggcaaggtcggatcctcgggcgaatccacgggaccgcaccttgattaccggatcaagcgctttggatcctatctcaatcccctctcggcgaaattcatgccggtcgcgccgctgccggcccggtggctgccggatttccagaagcgggcggccgccctccgggtcgtgctcggggcgccgcttcggatcaccggatccttccgctgatccgcttccgttccgcttcttgccccggccgcggtcccggcctacaatgccgtcatggaatcccgtcgtccccctcgccggtaccgcaatccgtttccgacggtcgacatcatcatcgagatccgagacgcccgcggccgggaaggcatcgtcctgatcgaacggaagaatcccccgcccggctgggccctgcccggaggattcgtcgaatacggggaatcgctcgagacggccgcggtccgggaagcttgggaggagacgtcgctccgcgtccgcctggtcgaacagctggggacgtattccgatccggcccgcgatccgcgccgccacacgatttcgacggtgttcatcgcccgggccgaggggaccccggccgcccgggacgacgccaagaacctgggaatcttcacccgccgggagattgacttccccctggccttcgaccacgccgaaatcttgaaggactactacgcccgcaagcggcgcctcaaagcgagatcctgacctcccggatcccggcgtgccgggagacatagcggagggtgacttcgccccgcccctcgaccaggaactggtgctccacccgtccgaacccgggaaccacgagaaactggacgtccggccggtccttcttgtggctcacccggtcaaagtcccggtcgacgaggacgcctccggccaggacccgggcgttcggcccggagacggtcagccggtcctggggatacaaccggtccttctgagcctgaaaactcatcgacgggacggccttggcgttggccaagcgggtccggacgcggaagaggccgtcgccgatcttcttcacctcggtcacgtccaaagtcacttcgggcgtgtgcttggccgagaaaaggacggacatggcgtttcggtggacgaggtcgggcagcatgaacggcgcggacaagcggttgctcatcttgacccatccgccgatctcgatatcgccgtacgtcggatgcttgaacggggcccagggcttgtacatctcgcccatggtcagattgtcgctgtacttgatccgctccaaggcccagaaatccccccgcagcatctgctccacttccccgcggggagtcgttcgttcggcttcctccccggtcttgaaggactccgccgaggcctggaagacctcgccgcaatagccgtaggcgccgaggtggcggaccagccattcgaccgagtcgccgtaggtggtgtagagatctttccaactgaccatgtaccggtagccgggggtgatccgctcggcctgccggccgatgtaatcatagacggcgacgtcctgcgggggatagtcgccgagccccttgcgggtcggcccgcgcaggaacatccccccgaaattatggaacgaccagcccaggcagatattggtcttggtcatcatccagccggccagcgcccggaggccccggccttggaagggatattccccggcgccgccctcgacataggacggggcccagtcgaagccccattggcggttgggatcgacgtagccttcggcgtcctcgttgacccggccgtcgccgtcattgtcgatcccctcttcgccgaggagcgtccattcgccccgttcccccggcttgatcctcaccgtcagccggggatcctccggattcgtcttgtattgcccgaaggggtccttgcggcgcatttgggtgatgttgccgtcgttgtccagatcgtcgggaggatcctcgtcgaggaggccgtcccggtcatcgtcgatggggatgcgcaggccccggccggagctcgcgttgttgggatcggccaggaaatgatatcggccgtcgacgttgaccacggggacgacgtaaaagcaattcttgtcgacgagggccgtgacctcctcgtttttcccgtagcgtcccaggaggtagtcgagaaggtagaggctgatctcgccgccttggatttcgttgccgtggatgttgccgtcgacataaacgcccggcttggccagggccggaccggtcttgggattgttgaccgtcatggcccaaatcgggcggccttcctcgctccggccgatctcctccagcgtcgtcaggcccggataagccttgtggagggcttggagcgcctcccccacttcggccaacgtgtagtaatggtcgaaccgaagcggaagcgcggcctcggcccggacggccggggccgccgcggacacgatcaagaacgccaggagcgccggcgcgatgtttttcattttccacctccaagctcgagagtccggacgtctccccaggcgctgggagcggcggcccggagctcgatcttcacgggcttgggcgaccgcacaatccaccggatcttccgccggccgctgccgtcgacggccgggaccgcggtccgcggccggccctcgatgaaggccaaatcccggccttcgagcgtgacgatcaccgggaagatccggttgttccggcgtcccatggccgtcggatacggcaggtagccggcgttttcgatccaggcctcgatctcatggagccccccgccgagcgggcggatcgtcaccggcccgagccggatgcgggccatccgggaagccagttcgaaaacccaagggacttgctcccggagcagcggctcgatcatcgccggcggcggagtcgtgtcggcgtagggaacggccccgccgatctcgatgtcccccaggaccgggtgcttgaacggcttccagtcgacgaacgcccttccggccggttccttgtcgctccaagccagccgggctttgtcccggggatcggccccctcggccgaggaaggcgggggcgtccgcatcatcatcgcggccatttccttggttgaggtccggccggtcttgatcgcttcaatcgcttgggcggccgtgaattccggcggagcgccggacgttttcaggaaggcggcgatcttctcttcgcccagggcgataaactcctcgccggtcatcttctccagctcgccgggagcgaggccgggagcggctttttcctccctcgcttcgggcagagtccagaagtcgagagcgaacgagggcaggcccagatgataataggcgtacagctcgaacgagccgtccttgtcggccgcgggggcgagacgcttttcatcgagccgggcggccttgaggaattccttgtacttgtccgagagctccgcgtaaaatttcaagtcctcgggcagcggattcacggccgcccccaggccgagaaagctcgcgatcaacgaggcatccaccgtcattccctcgggaagggaggctttggccagctccaggagctcctccatggtgtaatccttgtcggggtcggcgttgatgaacccggccatgtccttgggaacccgaatccggttcagatcggcgtccccgcgccggccgccgggcggaggattcaagcagaaattagctccgccgaagacgacggccaggccgatttccttgtgctcgttcacgaacttgaggacggcgaagctttcctcctcgctccccggccacaagcccgaaccgggcttgaaagcggcgaacaagtggggaaactggacgccgatgttcactccgccgggaggatcctcgttgtacgcgccgtcccgatcgttgtccaagccctcgggaagaagcttgtaaatcccctgctcgcccttggcccaatcagccttcttcaggaggcggggctggccgggcgcggggagccactcgccgccggggtccacaatccgcatcgtcgtgataagaccgtcgccgtcgagatcctcggggccgtcctcgtcgacggcgtcatccatgtcgtcgttccacggccggccgttgccgggatcggcccaaagcggcttggcgaaaaagcgggcggccgcgtcgggattgggacaacccaggacgtaccaggtcagatcccggcggacctcgggcttgtcgacgatccgcccgacgaggtacaaggccgcctcgccggccagcggatggaggccttcaaaatcggccccgacgaaaacagcgggaagcgttttcaccgtccggccggcctcgggacccagctcgatcaccaggacctcgcggccgccgggactttcggccagctcatggatcttgacgaagtccgggtgggagcgggccaaatcgcggaaggccgcggccatttccgcgggcggatggtagcggtcgaacgccacctgggcggaaaggggcgggacggtcagcgcggcggccatcaggggaaggaaaaagcggaggcgtttcatcgtcacctcgtgatcggatcattcaaaatcggctttccccgaaaggaaagagggaagattacatcatcaaatccggagacacaacaccaattccccttatttccccgccggcccggtcggagggcgggaaaataagcaaggcgggcggggaatgagggaaatgggtattgagtctctttaatagactagaggacggctttttcggaacgggcggaagccccgtaaaacaagcccgccagccggtcgaagtcccccggatcgtcggtcgtccaaaattccctccggccgcctttcgtgcaggccccgtcgatctccggatgacgcttgagataatccttcaaggcggccgcgacgagcgggccctgggaaatcagcttgaccgcgggcggcaggaaccgggcgatcaccggggccaggagcgggtagtgggtgcagccgaggatgatcgcgtcgatcccgggatcgagggccaggagacgctcgacatggcggcggacgaaaaattccgtcccggggccgtccaactcgttgttttcaacaagcgggacccagaacgggcaggcttcggaatggacgaccaggtccgggaagaacttcacgatctcgagggggtaggattgggaccggaccgtcccggcggtcgcgaacagcccgacatgccggctccggctgagcgtcccgacgcgctcggtgaccggacgaatgacgccgaggacccgccggccgggatgttcagcgggaagatccttctgctggatcgtccggagggctttggccgaggcggtgttgcaggccaggatgaccagccggcagccccggccgaacagccagcggaccgcctcccaggtgaagcgatggacagtctcgaacgatcgcgtcccgtagggcgtccgagcattgtcgcccaagtagacgaaatcgcagtccggaaggacggcggcgatttcccggaaaacggtcaacccgccgtaccctgaatcgaaaaccccgatcggcccggcgatgtccatcggaatcatcctactccgattccattttgattgcgacgttgttttgaatccagcgggcgtcccaccactcgaccgggtcgacgaagactccgtggacgagcatggcgaaatggaggtggtcgcccccggccatccccgtcgcccccgacaagccgaggacgtcgccccgggccacggatgaagacacggccgcgtcgatgcggctcaggtggcagtacatgctgaacaatccgcagccgtggtccaggatgaccgtctccccgtaaatgcccagcggcccggcgaaaacgacccggccggcattggccgccggaaccgggcagttcctgaccgaagccaggtccacgccgagatgaatctgccggtcgatctcccgcccgttgtaaagataggtccggcgctctccgaaggcggccatcgtcttggaccggggcaagcggagaaacgtcccgcgccacaacggccggggcccggtgtcgcggcagatcgcctggaggcgctcgtcgtcccgggcccgctggtcccggttgacggccagaaatatctcgagatccgtccccttgagggagggatcaaggctcttgaaatagggaacaacgccctcgaagaacgcgtcggtgagagtcaggacgtcgcttttgatccggacggacttcacgtccggccggaaatggacgttggtccggtttccggcttcatcctcggccaccccgatgaagggaacgtccggcggggcgtcgcacggaagggcgtaccaaacgaaataccggccgccgccggcttcgtaggcggggaaaaaggaatttccggcctggaggccggacaaagcggcgctttcgtcaagcatgaaggagacaacgcccgctccgccgggagcgatggaatgaggcccgccgaggaacgtcatccggggcggccgcgtgtcgatgatttttctcatctcccaaacggccgcgtttcccttccgccaggaatgatccgaggcggcgatccggagaatgatttcgccgtcggtcaaaccgcccggaagcggacggagggaaatcgttttttccactgagacgacgggttcgggaaattcctcggatagaagctcaacggttcgtccggcttggtccgcctcgacccggatccgggccagcccgctcttgcggtcctcgaaccggagggataattcccggccgagcgccggcccgtcgcgaagcaggcggaccgccggcttctcgaactcgaacttgacgatccagagccaggcgccggcggccaggacggccggaatcagaagccagcgggcgtttttgaatagattggttttcggacccgcgttcttccagcgcatgatcatctcccgttcgtgtttttgaacggatcaatattccacacgctccttcgttagtcaaggaatttggaacccgattacttttcttgattccgagaaataaacaacttgacttttttcagcttccgcggtctataatatattcgctgtaaaaatcacaaaggggaaaagcataaaagatcggtatcagattgcctttagatcgtcgtcatgaaattgtatgcgcattccaaagccgatacgccgcaaaatcaatggcatcccctggaagaacatcttcacgcgactgcgaataatgcgcgtcattttgcagaaacttgggaatccggagcgtgggcttacaatgcgggtctcttgcacgacttgggaaaaagcgattcgagatttcaaggatatctcctccgctgcaacgaactggacgattcagattatgactcgggccgcgtcaatcattcctcaacaggagcctcatgcgccgaagacggcatcaagccgttcggacgcatactcgcctatttaatagcggggcatcacgcgggattgcccgattggttttcatcggaatcggcaaatgccgccctttcaatgcgtcttaaagaaggacgtgaaaattcgaaacggataagagctttctctgaagagttgattttatcacttctgccaatgacgaagccgtcttttgtgaacgcggccaacttccacttctgggcacggatgttgttctcatgcttggttgatgcggattatctcgacaccgaacagttcatggatgaagagaaatcccggcaacgaagccattatccttatctctcttctctcgctcctcgtttattcgattttttagatgatctggaacagaaggcacctcaatcatcggtaaatgaaatccgagcggaaatccgccgtgcctgtgagcggaaagccgattcgccgaaaggcttattctctttaactgtgcccactgggggcgggaaaaccctttcagcaatggcctttgccatgcgccatgcgataaagcacggccaacgacgcattatctacgtaattccctatacgagtatcatcgaacaaaccgggcacactctttcccgggttttcggtcacgaaaatgtcattgaacatcacagcaatcttcatccggaaaaagaaacatttcgttcgcaactcgcctcagaaaactgggatgcgcctatcatcatcaccacgaatgtccaattcttcgaatcgctctatgcagccaaatcgagccgttgccgcaagctccacaatatcatcaacagcgttgtcatcctcgatgaagcccaattgttgccacctaatcttttgatgccctgcgtggagtcgatgaatgagcttgttcggaattacggagtcagcttggttttggccacggccactcaaccccttttgccgaatctcgagccggccttggaaatcatcccgccggaaatgaacctctatgaccgattgaaacggacaaaaatcgtttttccggaatcgacaattcgacctaaggattgggtgtcgcttgcggaacgattacaacaacacgagcaagttctctgtatcgtgaatacccgccgtgattgttatgacctttttaaattgatgccggaggggacgtaccatttatcggctttgatgtgtggagcacaccgatcggccataattcagtcgattcgcctgcggcttcagaaaaacttgccgactcgggtcatcagcacccagcttgttgaagcaggagtcgacattgattttccggtagtctatcgcgctttagccgggttggattccatcgctcaagcagccggccgctgcaaccgggaaggcgttctaaacaaatcgggaaaactcggcgaagtccaagtttttatggctcccaggccggcgcccagaggtttactgcgcaagggtgaggacacaacatgcgaaatgttcgaggatatgaaaaatcccgaccagccgggcgcggtttttcgctactttcggcttttctattctcgaatcaatgatgccggcagcgattttcgagaattattgacaaaggatgtaaatccaaatctcttcgttcagttcaggaccgcggccgaacaatttaagcttatagatgatcaagcccaacggccggtgatcgttcgatatggagatagcaaccattatataaaccgcttgcgctacgccgggccgtgccgggagatcacacgggcgcttcaaagattcactgtgaatattcctgtccaggtcgcagaagctatgcaatccgatggacggatggaggaaatcgagccggggattctgatccaatgtggattaaagatctatgatgaaaaaaccggtttagccgtatttgccgaacaattgccgattgaggatctaatgatctgacggaaaggagcgatatgaaaggattctgcctggaagtgagcgggccctatgcgtgtttcacgagacctgaaatgaaagtggaacgcgtcagttatgatgttattactccctctgccgcaagggcgattttcgaagccatcctttggaaaccggccattcgttgggaaatgaagcaaattgaagtcctcgccccgatccgctggatatccctccgccggaatgaagtggggaaagtcgcgtcgccgcggagcggaggcgttttcatcgaggatgatcgacagcaacgggctggattgttcttgcgcgacgtgaaatacaggctacatgcggagttcgatttcttgccgacagagaaacgcgaatcccctcgaaatcccgttccttcctatcttagcgaaagcacggatgtctccgatgacagggggaatgaaacaccggcaaaatatgcggcaatgtttgagcgtcgggcgaaaaaaggacagtgtttcaatcaaccttatttgggttgccgcgagttctcggcatcgtttcggcttgtcgatcatctagaagaaccttcaattccgattgatttgaccaaggatctcggctggatgctttacgatatggatttttcgaatgcggatgatcccaaaccgcttttctttcaagcaaaaatcgtcaaaggaatcatcaacattgaccgaaatcaagtcgaggtgcgcggatgattcttcaagcgctcaaggaatattatgaccggaaacctgatcttccccgtgccggttttgagatgaaagagattccgtacgtcttagttcttaacgctgatggaattcccgttaatcttaccgacacgtatgaaggaatgggcaaggaacgacaggcaaaaaaatttttagtgcctcaatccgtcaagcgaacagtggacataagcgcaaatttactttgggataatcccgaatacgcgctcgggattgtatgcaaaggaaaacccgcccgcgttgctaatcagcaccttgcgttcagaaaacgccttgatgacttgaaacttccccatgatcccgcgttgcttgccgtccaaaaatttctagccaatcctgaaaaatcgacgttattggaagctttcggcgaccgccttgaggagatgagaaaaaccggcgcctatctttccttccggattgtgggacaaatcgggctcattcttgaacagccggccattcgagaggcaattacgaaaactctctccacgcggcgagaaagcatttgcatggtgactggagagcgggacgaaacagaacaagtgcacgccgcgatcaagggcgtttggggcgctcaaaaaagcggtgcgaatatcgtatcatttaatttggacgcattccgttctttcaataaaaaacaaggagcaaacgctcctgtagggaaaacggccgctttttcctataccaccgcgttaaatcatttgctcgataaaacatcaaaacaaagaatccaagtcggcgatgcatcgaccgtcttctggtcgcaaaaagccgatcccatggaagaactcatgccgagcttcttcaacgaacccccaaaagatgatcccgatcgcaatgtcagggccgtagaggcattgttcaaggccgtccgaacaggggcttattcctctgatgattcaaacacacggttttatacgcttggccttgcgccgaatgcttctcgtatctcgatacgtttttggatcgttgacacgatagccggcatggcggaaaaaatttgccgtcatttcgaggatacgaaggtcgttcatggcccgcgcgataaagatactttatctttgtttcggctgcttgtatccacggccgcacttggagaggcgaaaaacatagctccaaacctcggcggcgacatgatgcgttccgtcttggaaggtctaccctatcctcaaacgcttctacaggctgcggtccgccgcgcaaggattgaacgagaaatgacttaccctcgagccgccctcatcaaggcatgtcttaatcgcgctcttcgatttaataatcctacgcacaaggaggaacttaaagtgagtctcgacaccgccaatccaaacatcggttatcggctgggtcgattgttcgcggcgctggagaaaatccaatctgaagcggttcccggcatcaacgccacgatccgtgatcgcttctacggcgccgcgtccagcacgccggttactgttttcggcaacttgatgcggctcaagaatcatcatctctctaaactcgaaaatgtcgggcgaaggatttattttgacaaactgctcggtgaaatcgtgtccgaaatcgtcgattttcccgctcacctatgcatggcggatcaaggccggttcgccatcggctattaccaccaaatgcaagatttctattcgaagaaaaatcataatccggaaaaggaggattgaacatgagtgaacccattaagaaccggcatgagtttgtattgattttcgacgtacgcgacggaaacccaaacggagatcccgacgccggaaatctgcctcggctcgacgccgaaaccggatgcggactcgtaacggacgtatgcttgaaacgaaaagtcagaaattacgtgatgctgaaggggcatgagattttcgtgaaagaaaaggcggtcttgaatagactgattgattccgcttatgagaatttggggattgatctaacaaaacggcccgctgacgagaaggatgggaagaagagaaacgaggagggagtcggccaggggaaggaagtcgaccgtgcccgctccgagatgtgtcgtcaatactatgatattcgtgcttttggcgctgtgatgtctacgggtgccaacgccggtcaagtccgcggaccggtccagatgactttcggacggtcgattgatccggtcgtatcattagaacactccatcacgaggatggccgtcgcaactgaggaagaagcggaaaaacaaagcggagacaaccggacgatgggtcgaaaaaacacgatcccttacggattgtacgtgtcacatggattcgtttccgcccatctcgccgcccaaaccggattcagtcaaaccgacttggaattattctgggatgcgttgaaaaacatgttcgagcacgatcgcagcgcagccagaggactgatgactacccagaagcttattgtttttaaacacgcaaccgccctgggcaatgcgccctccggcaagctatttgaacttgtcaaagtcgaacgcgccggcgacaaagaaaagccgcctcgttccttcacggattataatgtgaccgttgatcgggctaagcttcctcaaggcatagagttattagaattggcatgaattagagattcaataaaaacagccttattagtaagccattggatgcccgatggccggattggcgccggatgatattacagaccggttttcgcggtttgatctgattttgttacgatcatggaaagacctgatcgtcagaagctcgaaagaaaggataaccaaacggaaacagactccgcgatccaagaagataattttattccgatctccgcattacaacattttcttttctgcccaagacaatgcggactcattcatattgaacaaatctgggaggaaaaccgccttaccgtcgaaggcgaataccttcataaaaaagtacataaggcgggtctcgagaatcgccgcgatattcgtcgggcatatggagttcctatcagttcaaggcgcttcggtttaacagggaaagctgatctcatcgagtttcatttggatgagtctggagctcgacgaccgtatccggttgaattcaaacatgggcgctgtaaagccaacgactgcgatcgtattcaattatgcgcacaagtcgtctgtctggaagagatgttgagcattgaaatccccgagggtgctctgttttatggacaaaccaggaaacgcgaaatcgtcgtcattgattccatgttaaggaacacgtttgaaaagaaggttatggaacttcgttcccttttgacaagccgacgaacacctcccgcattgtacgagacaaaatgtatgtcatgttccttaatcgagcactgccttccccgattgccccaaaaacgaaacgctgttaaaagttatctggacctggagctggaaaacgaatgaaaaaacttcttaacacactctttgtgacaacacaaggggcgtacctgaacaaggatggcgaatgcgtcgtcgcatcggttgaaggcgaagaaagatttcgcattccgatccacaacctgggaggtattatctgttttggtaacgtgctttgcagtcctttcctccttggacactgcggagaaaaccacgtggccgtgagttttcttaccgccaacggccgttttctggcgcgtgttttgggaaaggtttcgggcaatattctcttgcgccgtgaacaataccggcgagcggataatcccgcagcatgtcttcatattgcgcgatcggcagttataggcaaaacgatcaactcgcgaacgattcttcaacgggctcttcgcgatcattctgatacgattccaataaacagaatatccgaagccgtcgcaattctcgcaaaacaagcctctcttttgcgcaaagcggagactttagatcaactccgcggccttgaaggtgacgcgagcaggacttatttcagcgttttcgacgacctcattacaaaccaaaaagagaatttcttttttcattatcgtaatcgccgtcctcccctggacaacatgaacgctttattatcattctcttatactctcctggttcatgattgcaccggagcattggaagcggtgggattagaccctcaagccggttttttacatcgggatcgtccgggacgcgtcagccttgccttagacttgatggaggaactccgtccgttcctggcggatcgtttggctttatcattgatcaacctccgtcaaataacgacggaaggttttaataaaacagaaacgggagccgtcgaaatggacgaagacactcggaaaactgtcatcacggcttggcaaaagcgtaagcaagagtcgatacaacaccgctttttaaatgaatcgattctcataggacagattccatttgtccaagcgctcctgctttcccggcatttgcgagatgacctggacgggtatccgccttttatttggaaatagagaagggaagtactgcaatgatggttctggtaagttatgatgtatcgaccgtcaataaagagggacgatcaaggttaaggcgtgtcgccaaggcttgcgttgatcgcggccaacgcgttcagcactcggtttttgaatgtgatgtcgatccggcccaatgggcggagatgaaaattcgtctccttgatatcatcaattttgatgcggacagccttcgcttctattttcttgggagcaattggcaacggcgtatcgaacacttcggtgcaaaacctagcctggatttaaaaaatgatacgcttttggtttagaataccctccgcgaatccgtatcgtccattttcatcagatatgcttcgcgctaggtctatctcgtttgttttcatcacgatgttattatttttttaaaaaatgacaaaacatactttatattttgactcgatacgcgcaaatactgctctaacgcaatatttttaatatacttacattgttcagtgtcgcgtcccgcgcggggcgcgtggattgaaacacggcatcggcaacccccagataggtgattgcctcgtcgcgtcccgcgcggggcgcgtggattgaaactacagacggcaacggggattctcaccggcgcgctcgtcgcgtcccgcgcggggcgcgtggattgaaactcaaaatcggcaaagtgcatcagctccttttcggtcgcgtcccgcgcggggcgcgtggattgaaactttgtccgcatggatacgtgcacggctccccgagtcgcgtcccgcgcggggcgcgtggattgaaacgattggatacgggcggggatcgtgcattgaatcctgtcgcgtcccgcgcggggcgcgtggattgaaactcagccgggaggagcgcccgtcgatagtcgacgcagtcgcgtcccgcgcggggcgcgtggattgaaactcaaagatcccggagaatgcgtcgggcaaaccatgtcgcgtcccgcgcggggcgcgtggattgaaactcgccctggccggcgactcacaatgggatggcgttgtcgcgtcccgcgcggggcgcgtggattgaaacattactttggcgggggtgtaccagtagtcagcaccggtcgcgtcccgcgcggggcgcgtggattgaaaccaactgcgtgcgatactccgcacgcatggcggcaagtcgcgtcccgcgcggggcgcgtggattgaaacaacgaatgtatcgcctggccaacggtcccctgggtcgcgtcccgcgcggggcgcgtggattgaaaccaactgcgtgcgatactccgcacgcatggcggcaagtcgcgtcccgcgcggggcgcgtggattgaaacgctgaattctgggaagcatatccggtcaaggaaggtcgcgtcccgcgcggggcgcgtggattgaaactgttcctggtttgcgggggtgcgaaatgacgatgtcgcgtcccgcgcggggcgcgtggattgaaacagtccatactgctgagtcaggaggtagagcttcggtcgcgtcccgcgcggggcgcgtggattgaaaccctggctcggcattaggctcgacgtaaacccggtcgcgtcccgcgcggggcgcgtggattgaaactcactggtgcgctcgaacaattacagacggtgatgtcgcgtcccgcgcggggcgcgtggattgaaaccggatgccaaatcgagccggcgaatcggatggacgtcgcgtcccgcgcggggcgcgtggattgaaactcgatggcccggcggaatcggctcctatcgcggccggtcgcgtcccgcgcggggcgcgtggattgaaacaagctgaccaattgccagctcgtgcgattcttcggtcgcgtcccgcgcggggcgcgtggattgaaacgccgaggtcaaccgcccctccgcctccgccaacgcgtcgcgtcccgcgcggggcgcgtggattgaaacatggagccctcggcgttgtcctggtcaagccgagtcgcgtcccgcgcggggcgcgtggattgaaactaatcggaaaccgaaactggcggcgacgtttttggtcgcgtcccgcgcggggcgcgtggattgaaacgggccgggggcggcattgaggctggcggaaacctcgtcgcgtcccgcgcggggcgcgtggattgaaacggtcaatgcccgtccctccgggcttttatcggcgtcgcgtcccgcgcggggcgcgtggattgaaaccggcccagtactcccgccaatacgggagaccccccgtcgcgtcccgcgcggggcgcgtggattgaaactcgcgctgccaatccgtcgcccggataacctgtgtcgcgtcccgcgcggggcgcgtggattgaaacgatcatgtccaaccgccgcgccgccgctctcgatgtcgcgtcccgcgcggggcgcgtggattgaaaccagcccgtgcttgataattttatcgagggacgggtcgcgtcccgcgcggggcgcgtggattgaaacaggatatcgccctggccgaatggtccgaacagcgaggtcgcgtcccgcgcggggcgcgtggattgaaacgacgaggtcatcgggttccgtccccatcgcgtcgtcgcgtcccgcgcggggcgcgtggattgaaaccggcgcggtcctgttcgccctgccattgcgtcccgtgtcgcgtcccgcgcggggcgcgtggattgaaacagcaatacctacgcgaacgcctatctcctgaaggtgtcgcgtcccgcgcggggcgcgtggattgaaacttagccgctgctcatacagcctccagatctttgcccggtcgcgtcccgcgcggggcgcgtggattgaaacgaggcgtgggcgcggacgctccccggctgggacacgtcgcgtcccgcgcggggcgcgtggattgaaacatccgacggcggcggctatgggtcaacgtcggatgtcgcgtcccgcgcggggcgcgtggattgaaacccgttgggcttggcgatggccgcgatcgcggcgggtcgcgtcccgcgcggggcgcgtggattgaaaccggagccgccggaaacagacgacggttatatgggtcgcgtcccgcgcggggcgcgtggattgaaaccggttggcggtgattttatcatcggcggccagggtcgcgtcccgcgcggggcgcgtggattgaaaccaatgtgcgtgtccccacacagcccgaatcggagtcgcgtcccgcgcggggcgcgtggattgaaacccatccttgggcctgtcggagtcatgggattcggtcgcgtcccgcgcggggcgcgtggattgaaacaggcccttcggaaccgaggccagtttgtacccgggtcgcgtcccgcgcggggcgcgtggattgaaacgtcaccggtgacgccgtcaacaaacccgagggcctgtcgcgtcccgcgcggggcgcgtggattgaaacccggccccggggccatacgccccacagcctcacggtcgcgtcccgcgcggggcgcgtggattgaaaccgttgccgtccagatacgccgttgtctccgtctggtcgcgtcccgcgcggggcgcgtggattgaaacttgaagataacttctctgcttttgatgaattatgagtcgcgtcccgcgcggggcgcgtggattgaaacgcgaatgttgcggccgctgatctgttgggcggagccagtcgcgtcccgcgcggggcgcgtggattgaaactcagccgatcgcctcagcgctcattgcctcaacgggtcgcgtcccgcgcggggcgcgtggattgaaactaatcataaggggtgggtcgtgaatgtcatttgtgtcgcgtcccgcgcggggcgcgtggattgaaactagccaatccggcgaatcctgatagatcagccccagtcgcgtcccgcgcggggcgcgtggattgaaactcggagctgtccccggacgcccttaatcaccgtgtcgcgtcccgcgcggggcgcgtggattgaaacctcctattccctggccggggttgccgccggccctcgtcgcgtcccgcgcggggcgcgtggattgaaactgataatccttgggaacgaaaaaaacacgacggggtcgcgtcccgcgcggggcgcgtggattgaaacaccaccttttcggaattgccgtgaaagaaaaaggtcgcgtcccgcgcggggcgcgtggattgaaacgtcaccggtgacgccatcaacaaacccgagggcgtcgcgtcccgcgcggggcgcgtggattgaaactctggactgtggaaagaaatcctgggggcgaatgtcgcgtcccgcgcggggcgcgtggattgaaaccgcgaacctgtcaaaaaacattgctatggaaacgagtcgcgtcccgcgcggggcgcgtggattgaaactgcattgctatccgctccgcatgtccttagtaagtcgcgtcccgcgcggggcgcgtggattgaaactggatgatcccctgaacgtccgtcccccaatcctggtcgcgtcccgcgcggggcgcgtggattgaaacgttgtggatgctaatttccttgttacccttgccgcgtcgcgtcccgcgcggggcgcgtggattgaaacgcccaatgccatttgaggagagcgttcagcgatgggtcgcgtcccgcgcggggcgcgtggattgaaaccgatcgaccccaacatcatcgccgtcgccgtgtgtcgcgtcccgcgcggggcgcgtggattgaaaccagataaatgcacgagccctgacattcggggccaagtcgcgtcccgcgcggggcgcgtggattgaaactaatttaggtgggaaaaattatctcgaatcgctgggtcgcgtcccgcgcggggcgcgtggattgaaacatgactgtgaacgaaaaacgaacggccgtcggtcgtcgcgtcccgcgcggggcgcgtggattgaaacctcatggaagcttcgaatccccttgtgatgcggggtcgcgtcccgcgcggggcgcgtggattgaaaccctgccggcgcgtgataggctgaaattcctcaggccggcggttcttcgcatcatgcgccgggcggaatggattgagcaaagacctgctgattcgtaatcagcaggtcgggggtctaaatcacgcccttgcggacggaacgattgaaacatcaatctgtaccgactgagctaatagaccatttgttctgctcttttttgggcgcgctcatgttataaacggacaggttacagcccacaccgctcgtaggggttcgagtcccctcttcgttatttttcggccgcgaagcaccgcccgatacgaccgaaagcggcgccttgcgagcgctgaaagcgcggcaaaacggcgccgccgccccccgcttgaaaatccctgaattccgcttaaaatcccccggaaaattccaaaaaaaatgcttgtttttcccgttttatcccgcgaatcaatatattatctttattattaattacttagccgcattataccccccctttcaactctctcgaaaaaagttgatttcccttgacaaatccatctgattcttctatatttgactcgaaaatgggacaaaacgggacaaaatgggaaacttactgatcggaagctaccgggccaagctcgacaaaagcgggcggctcaaggtcccggaaaaattccggacggcgctcgaggagcgctacggcctggactttttcgtcacctcgctggaaagctccacgatcaaaatcttccccctgcccgtttggctggccatgaccggttcgacggaaagcggcaatctctacctggatcccgacgttgaggattacatgcggcgggccaacaccttcggcgtgcagtgcgaactggacgccaagggccgggttttgatcagccccgaccttcgagccatggccggcctcgacgccgaggttgtcgtcatcggcctcaacaaccacctcgaggtctgggacacccggcggctcgacgagaagctccagaagaagccgctgacccgcgacgacttcaagaagatcgccgagatcatgacgggcaggaaagggccatgaccgggcgtgatcacatcccggtcctgctcgatgaatccctgaccctcctggacgcgggccggtccggcgtctatatcgacggaaccctcgggctggccggccactcccgcgagatcctgaagcgcaatcccggcgcccggctggtcggcttcgaccgcgacgaggccgccctgaacgaagcccagcgccgcctcagcccctaccggaaccggatcgcgctctaccacgccgacttccgccggctcctcgaggtggagatcgactgggcgtccgtccgcggcgttttcctcgacttgggcatgtcgtcgttccagctggacgatccggcccgcggcttcagccaccagttggacggcccgctggacatgcggatggaccggcgccagcacttggacgcggccagggtcatcgacaagtatcccgaagcccgcctggccgacctcttccgcaattacggcgagctccggccggccgccaagctggcccggacgatcgcctcccgccggcggatgacgaagatcgaaagcacggtccagctgcggaccatcgtcgaggaggtctgccggtggattccccagaaggggaagacccatcccgcggccaaggtcttccaagccctccgaatcgaggtcaacgaagagctggccggcctcggggaatttctcgaaagcgtcatcgcccgtcttcccgaagacgggcgcctggccgtgatctgcttccactcgctcgaggaccggatcgtcaagcacaccttcctccgggcggcccggcccgaccaggaaacgggccggcggcccgcccaagtcgagcttctgacgaagcatcccgtcgtccccggcgaggcggaaatctcccgaaactccaggtcccgctcggccaagctccgggctgtccggaaacaggctcatggttcataagaagttcacccgccgccagatcgtcttcaccgccgggacggccctggtcgtggtcttcatcctggccttctacctctggcaggtcgccgagacggtccgcctgggatacgaggccaacgaggcggaaaacgagaaaaaggcgctggaaaaggaagtcctccggctccaggccgacagggccgcccttctttcgctcgagcgggtggagcggacggcccgcgagaagctcggcttgaccgacccccgcgaggatcaaatcatctacgaggattttcgatgaaagccgcggccttccttcccggcgaggagatcgcccgccggacggcccgcatccggacccgcgtcgtcctggcggtcatgatcctctgggccgggggcatcgtcgtccgcctcgtccagctccaggttttcttccacggccgggccaaggagcagatcgcttaccagaaccaagccaaggtgaagatattccccgaacgagggatgatccgcgaccgccgggggatgatcctggcccagatggtttccctccggtccgtcttctacgccccgccggccaaggagacgcgggcggcgcggcggaccgtcatccggaaactcgcctcatgtctcgacctcgacgagaaagccgtcgcggggatcgaggcggccgccgatcaaagaaagcccttcatctggatcaagcgcaaaatcgagctcgagaccgcggccgccgtcgacgcgcttcggcttcccggcgtcttcacccaggaggagccgcagcgggtttacccccagggcgccctggcctcccacgtcctgggcggagtgaatatcgacaacgacggcctggccggagtggaaatcctcttcaacgacacgctccgcggcaagccgggcgagcggatcatctaccgcgacacgtacaagcggccgtaccggagcgagcagaccgtcgcccccgaaagcggccgggacatcgacctgacgatcgacgccgtgatccagtacatcgcccagcgcgagatcgaaaaagcggtggccgagaataaagccgcctggggcgccgtgatcgtctccgatccggcgacgggcgagatcctggccctggccaacgccccctcctatgacccgaatctctacgggaagaccgatccggccgcgcgcatggactgggcctacagccggcggatcgacccgggctccaccttcaagatcgtcaccgcctcggccgccctggaaaaccgcaaggtggcgacctacgagacattcgactgccgggcgagcgcgatcgacgtggccggcggccccatccgcgaccacaagccgttcggcatcctttccttctccgggatcatcgccgaatcttccaacatcggaaccatccagatcggccgccgcgtcggcgccgagctgatgtataggaccatcaaggatttcggcttcggagagcgcacggggatcgagctgccgaccgaatcggccggcctcgtccatccgccggaccgctggtcccgccggtccatcgattccgtctccgtcggctacgaggtttccgtcacgcccctccagcttctccaggcaatcaacatcgtcgccaaccggggcgtccggctcgccccgcggatcatcaaggcggtggacgggcggccccggccgccccaggccgacgaggctccgccgatcgaggtgatctccccccagacggccgagaagctcatcgaaatcctggagagggcggtgcttgggggaacgggaaaagccgcggccgtccccggctacacggtcgccggcaaaaccgggacttcccaaatctacgatccgatcgagggcaaatattcgctcagccgccacacggcctcgttcatcggcttcgtcccctcgaacaagccggccctctccatggccgtcgttctctttgagccccggaacaacgcctattacggcggccaggtggccgctcctgttttccgggccatcgcccggcccgtcctccgttatctccatgtctttcccgacacggcccccgcgacggtgcacgcctccgccgcgtccgccgcgccgcccgctttccgccaggaggccgaggaatgaatctgaccgatctcctccaagggatttccgccgtgtcgctcgaaggcgatccgaagctcgagatctccggcttggcctacgcctcggccgacgtccgccccggctttcttttcgccgcctggaaaggcactctccgcgacggattcgagttcgtcgacgaggccgtcgggcggggggcggccgccgttctctccgaccgcccccggccgggaggacggaacgtcgcctggatccaggttttcaatccgcgtgaagccctggccctggccgcggccaatttctacggccggccggccgcccggatgaagatcgtcggaatcaccgggaccaagggcaagacgacgatttcctacatcctcgaatccatcctcaggcaggccggatacgccgtcggagtcatcggcacgatttcccaccgcggccccggcttcgagctccaggcctcccggaccaccccggaatcggtcgacctccagcgcatgctcaaggaaatggccgaccggggcgtcacccactgcctcatggaagtctcgtcccattcgcttgagcttcaccgggtctccgggatcggattcgacgtggccgtgttcaccaacctctcgggagaacacctcgactttcaccggacgatggaagactatttcgaggccaagaaaaagctttttttcctcaacgccaagaagagaacggcggtcatcaacctggacgattcctggagccggcgcctcatcgccgagcttccgatgaccaccgtcaccttcggtctcgagccggaagccctggtccgggccgaacgaccgaaattcagcggggcggggatcgaggccgtcatttcctatcccggcggccggattcccatcgtttcccccctggccggacggcacaatttatccaacctcctggccgcgttcgccgtctccatggccctcggcgtacccgtgcccttgatcaaggagggtatcgccggactcgcccagattcccggacgcttcgagaaaatcgaaaattccctcggtttccacgtcgtcgtcgactatgcccacaccgatgcttccctccagagcctgctcgagaccgtccgggatctcaagccggcccggattctcctcgtgttcggggcgggcggcgaccgcgaccgggccaagcgcccccggatgggggccgtcgcggcccggtacgccgattggaccttcctcacctcggacaatccccggagtgaggatccggcggcgatcatcgccgagatcgaggcgggcttcacggccgccggcggcgcgaaatacaccatcatccccgaccgccgcgaggcgatcacccgggccctggccgaagccggcgaaggcgacttcgtcgtcctggccggcaagggacacgaaacgacccagacatccgggataaatgtcaggccgttcagcgacgccggtgtcgcccgggaaatcctggcggctttggagaagaaataaccatggcccttctgcgcgcctccgaaatcgccgcggccgccgggggaacggtcctccagggcgaccggggagccgttttttcttcgttcggcctcgattcccggacgatcgagcggggcgggctgttcttcgccctcgtcgccgggcgggacggccatgacttcgtgccggacgcggccgcccgcggagccgccggggccgtcgtctcccgcggcgtcccggccgccgacaaggcgttcgttctcatcaagaccggggacacggccgcggctctccaggacctggcccggtcggttctcgtccgccatccggccaaggtcgtcggcgtcaccggcagcgtcggcaaaacaacgaccaaggaattcatcgccgcccttctgggaacgatcttccgggtccataaatccgagggaaacctcaacaaccatctcggcctgtccctttctgtgctccgcctcgagacggagcacgaggtcgccgtcttggagatgggcatgagcgcggccggggagatccggcggctgaccgggatcgccccgccggacgtggccgtcgtcacgaacgtcgccccggtccacctggccttttttgaatcgctccaggccgtggccgaagcgaaggcggaaatccttgagggattgaagccggacggcacggccgtcctcaacgccgacgacccctggagcaagaccctcgccgaccgggccccggggcgggtcatcactttcggcttcagccaagacgccgaagtccgggcttccgggatggcctacgcgggatatgacggcctccagttccgcctgcattacgacggggccgcccgcgaagtcaccctccccttcctgaccggggggcaggtggaaaatttcctggccgccctcggggtcgcggcggccttcggcctcggctgggagaccctgaggccggctttggccgtcctcgccccgacggccaagcgggggaacatcatccgcctggcccggggaatcacggtcatcgacgacacgtacaactccaatccgcgggccctggacatggccctccgcagctatatcaaccttccggccggccggtgggtggctgttctcggcgacatgctcgagctcggcccggaaggggatcaataccacgaagacgccgggcggaccgccgggcgcttgggctgggacatcgtcgcggccgtcgggcccgcggcccggcggatcgcggccggagcccgggccgagggcctggacgcggcccggaccccggaattcgcctcgagcgaggaagccgcggcgaagctcccggcccggctcaaggccgacgacctggtcctggtcaagggatcccggggcgtccggatggaacggatcgtcgagcggctgaccgccctcatgaaggagaactgacgtgctgtacgcccttttcaaaaccctccaggcgtcggttccggatttcaacctgttccgctacatcaccgtccggaccgccctggccggaatcacggcgatggccttggtcttgttccttggccccgtcttcatccgcgggctccggcgtttccaggtcggccaattcgtccgctcggacggcccggcctcccacctgagcaagcagggcacgccgacgatgggcggcctcctgatcattacggccacgatcgtccccgttcttctctggggcaatctggccaacacgtatgtgctgttgacgatggggacgatgatcgccttcggcgggatcggattcctcgacgactacatgaaggtccggaaaaaacagtcccgcggcctcttcgctcggagcaagctcctgtttcagatcctcctggcggccgttttcgccctgttcgtcatgttcctgagcgccaacggggatttcaacctccatcttttcttccccattctcaagagatgggcgccctatctcggctggctctatgccccctggatcatcttcatcgtcgtgtcctcgaccaacgccgtcaacctggccgacgggctggacggcctggccatcggcctgaccctgatcggggcggcggccctgaccgccctgacgtatatcgccggccacgccgtgttttccaattacctgtacatcgcccgcgtccccctggccgcggagctcacggtcttcggcggcgcgctcgtcggggcctgcctcggcttcctctggttcaacagccatccggcccaggtgtacatgggcgacgtgggcgccctttccctgggagcgacgctggccgccgtcgccatcctcatcaagcaggaattcctgatcttcgccgtgggcggcgtcttcatcctcgaggccctctcggtcctactgcaagtgtcctacttcaaggcgacccgggggaagcgcctcttcaagatggccccccttcaccatcacttcgagcttttgggctggccggaggagaaggtcgtcgtccggttctggatcctcggcctcattttcgccttcttcagcttggccacattgaaattgagatgaccatgaatttagacggacggaacgtgctggtggtcggcctggcccggacgggcgaggcgacggccgcgttccttcttcgccgcggcgcccgggtgaccatcacggagagcaagccccgggcggagctcggttccaaggccgagacgtggatccggcgcggggtgaagctcgaagccggcggccacacgccggccgcctttcttgaggccgatttgatcatccccagccccggcgtgccccgcctccccgagatcgcggccgcccgggaccggggaatccccgtctggtcggagatcgagctggcgtcccgctttctgaaaggctcgatcgtcggcctcaccgggacgaacggaaaatcgacgacgacaacccttcttcaccgcatcctgaaggacgccggccgcccggccttcctggccggcaacatcggcacgcccctgatctcctttgtcgaccggagccgtgacgatcatctctacgtcaccgaaatctcgagcttccagctggaatacgtccacgccttccgggcgcggctggccctggttttgaatctgtccggcaatcatctggattggcacggaacgatggatgattacgccgcggccaaggccaagctcgtcctcggccagaagcccggagacgcaaccgtcctcaaccgggaggacgcccgggtttgggcctggaaggaagcggcggtctccgacgtcttcgccttcagcggcaagcggccggtccgccggggcgcgttcgtccgcgacggctgggtggtcgtccgcgacggcggagaagagcggcggatccttcccgtgtccgagatcaagctccccggcctccacaaccgggagaacgtcctggccgcggcggccgccgcccgccttctcgggatcgccccgtcccggatcagggcctccgtccgcggcttccgcggcctcgagcaccgtctcgagccggtcgccaccgtcggcggcgtttccttcatcaacgactccaaggccacgaccgtggacgcgaccctcaaggccctggccggcttcacccggccggtcgttctcatcctcggcggcaaggacaagggatccgatttccggccgctccggaaggccgtccggcggggcgtcaaagcggtggtcctcgtcggctccgcccgggaaaaaatccgggaagccctcgccgggaccgttcccctgctcgaggccgagacatacccggaagtcgtccgggcggcccgggccgcggccgctcccggcgacatcgtcctgctcgccccggcctgcacgagctgggacatgtttcgggatttcgaggagcgcggccgggtgttcaagcgggaagtccgccgcctggcccggaggaagggataacggcgatggaaacctaccgccgccactccttggacaagaagatgctgtacgcgacgatcatcctcatggtcatcgggttggtcatgatcatgagcgcctcaggggtttacgccgagcaggcctaccagaagaagctctacttcttcctccagcagctcggcggattcgccgtcatcctggtcctgctcgcgatccttctcaacatccgccggccggtctacaagagcccggtcgtcattttcggccttctcggcctgacgttcggcctgcttctcctggcccttctcctcccgccggtcgcccggaccaaccggtgggtcctcctgggcggagtccgcttccagccgtcggaactggccaaactcagtctggtcctgtttctagcttggtacgtcgaccgcaagcgggaaaaaatcggcgaattccggaccctcctggccccgatgggagtggtcgttctcttcaccttcctcatcatccgggagcccgatttcggcacggccgttctaatcctggtcctctgcctggtcgtcctcttcgtgggcggggtccggccgaagcatttcgccgtgatgagcgcggccttggctccccccattcttttttatctcttttcggcgccctaccgcgtcaaccggctcatggccttcttctccccgcaaacgagcgtggaaaacctcaattttcaggtcgcccaatccaagctcgcggtcgcctcgggagggctgttcggcgtgagccccggggagagcgttcagaagatgttcttcctcccctgttcccacacggatttcatcttcgccatcatcggcgaggagacgggcctgatcggcacgctcatcctggtttccgtctactccttcctggtctggcgggggatcaaaatatcgatgaacgcgccggatttcttcagccaggtcgcggccgccgggctgaccctcttcctcggcttccaggccctgctcaacatcacggtcgttctcgggttggccccggccaagggcgttccccttcccctggtcagcttcgggcggtcgtcgcttttctgcacaatgctggccatcggcatcctgctgcacatctcccagcggcggggcgaggtccggaggatcgtatgaccgcacggcgggtcgtcatctgcggcggcgggacgggaggacacctgttcccggctctggtcctcggccggacgctccgggagaaggatccggagatcgaggtgaccttcatcggcagcgaccgggccgaggagcgggccctgatggcccgccacggcgtgccgttcatccccttgagggtcgagggcctgaaagggcgggggctgcggagcctgaaaagcctggcccttctccccttcgccctggcccggtccttccgcatcctccgccggatccgtccgcacctcgtcgtcggcgtcggctcgtacagctcgggaacggtcgtgctggccgcctcgcggatgaaaatcccgatcctcctcctggaacagaacgccgttccgggcttcaccaaccggcgcctgctcggccgggccgaaaaagtcgcggccgccttccaggcgtccctcgtccacctcaagggcaagggcgttttcctgggcaatcccgtccggccggaattttcccggcttccccgtaaaatccacggcggccgcatcgagctcttggtcttcgggggaagccagggctcccatttcctcaacacggccgtgaccgcggctcttcccttcctccgccggtggaaagaccgcctccggatcgtccaccaaaccgggaaagccgatctggccgaagtccggaggatctatgcccaggacggcttccccgacgccgtcgtcgagccgttcttcgacgacatgccggcccggttcggagaagccgatctcgtcgtcgcccgggccggagcaacgacctgcgccgagctcatcgccgcccgcaaggcggccatccttgttcccttcgccggggcggccgacgatcatcaacgcaagaacgccgagatcctggccgaagcgggcggagcggacgtcatcctcgagtccgagtggtcgccccagcgcttcgccgcgaccctcggcggcttgatcgagcggccggagcggctgaaggcgatggaagacgccctcgccgtcttggccgtggaggacgcggccggaaagacggcggatttagccctgagcctgatgggccggaggaaataggagaatcgcatggtgaaaactgtctatcgcaagctcaagcatatccatctgatcggcatcggcggcacaggcatgaacggaatcgccgaggttctccacaacctgggctaccgggtgtccggctccgacctcaacgacagcgacgtcacccggcgcctgcgggacctcggcgcgaccgtttctatcgggcatcggagcgaaaacgtccaccgggcggacgtcgtggtcatctcctcagccgtccgggaggacaatatcgaggtccgggaagcccggcggatgaaaatcccggtcatcccccgggcggagatgctggccgaattgatgcggatgcgctacggcatcgccgtggccggctctcacggcaagacgtcgacgacgtcgatgatcgccgccgtcctgggcaaggccggcttcgacccgacgatcgtcgtcggcggccggctgaacaccgtcggagcccacgcccggctgggagagggcgacttcttcgtggccgaggccgacgaaagcgaccgctcgttcttgatgctctcgcccttcatcgccgtcctgaccaacatcgacgccgaacacctggacaagtacaagggcgtggacgagatcaaaaaggatttcgtcaccttcgccaataaggttcctttctactgcccggtcattctcagcctggacgacgccaatctccagtcgatcatcccccgcctggagcgccggatcatcacctacggattctcggcccaagcggatttttacgcccgggacatgcgctacgaggctttctccagcgtctcgaccctcctccacaaggggcgggagatcgggacgctccggctggccgttcccggcccgcacatgatcctcaacgccctggccgccgtcgccgtcggccgcgacctggacatcccgccgtcggtcatcctcgacgccctggccgagtacacgggagccggccggcgcttcgagctcaaggccgacatccgcgaaatcatggtcatcgaggattacggccaccatcccacggaaatccgggcgaccctgaacggggccaagctcggctggccgcggcggcgcctcgtggccgtcttccagccccatcgctattcccggctggctcatctccgggacgagttcgccacctcgttcaaccaagccgacgccctcgtcctgaccgaaatctaccccgccggcgaggatccgatccccggcgtgtcgggccggagcctctacgaggagatggtccggttcggccataaggatgtccggttcgtccccgacttccgcgatattccggcccggctcatggagctcgtccggcccggcgacattgtcatcgtcctgggcgcgggcaacatcaaccggatcatccccgatttgatccgtctcctggagaaaggaacatgagccgcgaagccggattcgtcgtcacgatgcagtttcagcggaacgcggagcccgctcgagtcaaaaagcccgtccgcacgtcccctctccgtttgatccacgtcttggccgccgtcgccgccgtgggggctctctttttcggagtcgcccggcttcacggcttcctgctcacttgggagacgctggacgtccgctcggccgaagtcgtctgccccgacccggccgtgagggagctcgtccggccgatcgcctcccgggcggccgccggcaatattctcttgcttgacgcgtcccgggtgaaagccggcctggaggcttgtccctgggtcaaggaagcgcacgtccgcaaagtgttcccgtcgtcgctggcggtcgatatcaccccccggaggccggcggccatcctggacgccggccgcggcttccttctcgaccgcgacaacgccttgatcgaacccgctcgccccggggaccaggagcgcctccccctcttccatgacgacgggatgttcgccgcgagccgggacgccaagctcgccctggcctgggcctgctgggacgacttggacgcggcggaccgggaacgcgtccgccgtctcgacgtgacccgcccggacgatgtcgtggcgacattccgggacgatcccgtcaggctccgactgggcgcggagggattcgcccggaaaatcgctgaataccgcggggcccgcgaccgttggaccgccgctttcggcccgctggaatacgtcgaccttcggttcccggaccgcatttatctaaaagccgccgtcgaggaggaataatcatggccaaaaacggatatatcgtcggcatcgacatcgggacgcggacggtcaccgtcctgatcggagaaatcaacgaggagcgcaagatcgaggtcatcggcatcggcacggccgaatcgcgcggcttgcgcaagggcgtcgtcgtcaacctcgacgaaacgtccgaggcgatcaagaaagcccggacggacgccgagctgatggccggccaggagatccacgcggcgttcatcggcgtttcgggcgcccacatcaagagcttcaacagccggggcgtcatcgccgtctccggacgaaaccgggaaatcacccaggaggacatccgccgggtgctcgagcagtcgaaagccgttcccatcccccccgaccgggagatcatccacgtcattccccaggaattcatcgtcgatgagcaggacgggattcacgatccgctgggcatgaacggcatcaagctcgaggtcaacgtccatatcgtcacgggcgcggtgaccctgctccagaacctccggacctgcatcgagcgatccgatatcgtcatccagagcctcgtcctgaaccaaatcgccgacgccgcggccgtcctctcccccgacgaaaaggagctcggcgtcggcctcatcgacatcggggcggggacgaccgaagtggccgtcttcgagcgcggaagcctctggtacacctcgattatccccctgggcggagacaacttcaccaacgatatcgccgtcggcctccgggcggccatccccgacgccgagaagatcaagaaaaaattcggctgcgcccttccgcccccgggcgaggagcaggagacgatcgaggtcccggtcgtcggccagaaccgcaagccccggattctctcccgccagctcctggccgagatcatccagccgcgggccgaggagatcttccgcctggtggacaacgacatcaagcgcatgggattcgaaaaatcgctcaacgccggcctcgtcctgacgggcgggacggcccttctcgacggcctggaggtcgtggccgaggaaatcttcgacctgccggtccggcgcggcgatccgggcggcgtggccggcctcatggaccgggttcggacgccggacttcgccacgcccgtggggctccttctccacggatacaatatgaccggcccgggcggcctgggccgggatcgaaaacgaggcctgtgggccagattcaagaatctattcaaggaagactaggagggcgacatgaacgcggaaaaaaacagcaagcttaagtttcagctggtggaggaatcctccagcgccaacatccgggtcatcggaatcggcgggggcggcggcaacgccctcaaccggatgatcgaggccgggatcaacggcgtcgacttcatcgccgtcaacaccgacgttcaagccctcaattccagccgggcgcccatcaagatccagatcgggccgcagctgacgaaaggcttgggttccggcggacggccggaaacgggcaaggcggcggctatggaggacaccgagaagctcctcggtctgctggagggatcggacatggtctttctcacggccggcttgggcggcggaacggggacgggggctactcctatcatcgccaacttggccgccgagctcgacattctctgcgtcgccatctgcaccctgccctttgagttcgaggggcggcttcgggccaagcaagccgccgaggggctggccgatctgaaagcggccgtcgacacggtcatcgccattcctaacgagcggcttctccagaccgtctccttggacacgtcgatgcaggacgccttccgcatcgccgacgacgtcctccggcaggccgtccaaggcgtttccgacctgatcacgacgccgggcatcatcaacctcgacttcgccgatgtccggacgatcatgaaaggcatgggcatggccttcatggggacgggcttgtcggccggccagaaccgggcggccgaggcggccaacaaggccatcagcagtccgctcctgatcgacacgacgatccaaggagccaaggggatcctgatcaacatcaccggcggaaaggatctcaccctgcacgaggttcagaaggccgcccagctcatccacaccctggcccaccccgaggccaacatcatcttcggggcgatcatcgacgagaccatgaaggagatggtcaaggtgacggtcatcgccaccggcttcgaacccggtttgccccaggaggcagccgcggccgccggcgaaacggcggcggccgccgcacaggcgcccttctaccggaaaacgcctccgccgttccccctccggatgaacacccccccgtacgaattcgagccgaagggcggccgggctttcgacgccgtttcgcctgcggcccgggcggcggccaagacgccgcacccgtccacgttcgccgagatcgattacgaaagcctggacacgccggcgttcatccgcaataagggccaccaattccggaaatcctcatgatcaaggccgattgcgtcgtcgccgggtgccgagagctcgccacctgccgcggcccgatccccaagcgccgggaagcccttcaggacgcaggcgtgatcgaaaacgcctggctggccggacgcggaggacggatcgtgttcgtcggaccggaggacgagttccgccggacggtccggccggaggcgggagccgcggtgatcgacgcccgggggctcgtcggcttccccggctttgtcgacgcccatacccacctgccgttcgccggcagccggggcgatgaattctcgctccgtctccaggggtggacctaccagcagctcgccgcccggggcatgggcatccgctcgacggtccgggcgacccggtccgcgacgcgggaggagctccgcgacttgtgtctagcccgcttggacgaaatgctcctccacggaacgacgacggccgaggctaaaagcggctacggactgaaccgggaagacgaaatcaagcagctcgaagccgtgcgcgacgccgacgccctccaccccgtcgacctcatcccgacgtttatgggcgcccatgaaatcccggacgaattccgtgatcgaaaggaggactatcttgaccttcttattcacacggtcatgcccgcggtccgcgatcaaagcttggcccgattcttcgatgttttctgcgaggagggcgtgttctctctggatgaaacaaaaaggctggcggaggcggccctgtcggccggcttcggacttaaaatccacgcggacgaattcgtccccctcggcggaacggagctggccgcccggaaaggggcggtctcggccgagcacctgatcgcgatcaccgagagcggcatcgccgccttggccggaagcgtcaccgccgcgatcctcctgcccaacgtcccgttcttcctgatgcaggacaagcgggccccggcccgccgcctgatcgacgccggggcggtcgtcgccctggcctcggatttcaacccgggaagctcgatgacctcgaacatgcagtgggtcatccagctcggcgtcttccagatgcggatgacgatcgaggaagccctcaacgccgcgaccgccaacggcgcttacgccatccgggagcacgagaaccgcggaagcctcgagcccggtaaattcctggacctggtcctctgcgacatgacgacgcccgccgacctggtctaccacgtcggacgcaatccggtgaagttcgtcctcaagaaaggcaaggtcgtcgtctccggcggccggatcgtccgcggcgaccgggccgactcctccccctaggtcccaatccctttttgtcccaagggggcgtctccgcaaggaggcgcccccgattccccccgctcctgaaaaacccgccccgcggagggacgagccctcccggccttggttcgctcttccgcgtccgaataaaccgcgccccctgagggatcggattaaagacctgtctccgtctggaagaacgcggcccgcgtcagcccgaggcgcgttgaaaagaacgccctccgctaccccctcgccgtcatcgggaggataaagccgtggattccgttcaggaccatctggaggccgatcgtcgcgacaatcaatccgaaaatgcggatcagcggattcatcaggttgaacgtgatgagaacatccccgatttttttcgccgccagcatgaaaacgaggttgacggccaaggcggcgacgatcgcgatcacggtcactccattcccataatcggccgggaatgtcaccgcggcggtgatggtcgcgggtccggcgatcatcgggatggcgatgggcacggcagtcagatccttcgccgagatgttcttgtccattttgaagaagacgccccgctgcaagccggtaaggccgttgtaaaacagaacgatgccgcaggtcatctggaacgcgtacaactcgatatggaaaacatagttgaaaatgacatggccggccgcgaggaaagccaccaggatgatcagggcggtgagggtcgacttaaccgagatgaaccgggtggttttgccgtcgaattgccgctggagcgaatggatcacgaagatcttctgaaccgggttgaccagggcgatgaaagccacgaagctgctgagaagcgttttgatgaattccgcggccatgatcttgtttcccctctctccccggaccggcggcccggctattcgttccgcctgagcagaacgacggtgatgtcgtcgaattggctgcctttctgaaattcgtccaggtcggccgcaagccggccccagatcgccgacagggcgtcgtcccggcgctcggccatgaaaccggcgagcctctcctctccaaagaagctcccgtccggcgcggccgcttcggtcactccgtcggtatagagcatcaggaggtccccgggctcgagacgagtccggccttcgtggtaggacacccccgtctcgacgcccaggaagacgtcgcccatggattcaagggtccggagcgtccgatcgcgcgagacgatcaccggcggattatgcccggcgttggcgtaggtcagcccgccggtccgggcattgaatacggccaggaacatcgtcgtgaacatgcaagcgtcgttgtcccggctgagaatctcgttggccgcccggagcgattcggccggcccgactcccttgcggcagacggtcttcatcagcgtccgattgacggccatgaacagggcggccgggacgcccttgccggagacgtcggcgatcaggacggccaaatgatcctcgtccaagaaaaagaaatcgtagaagtccccggcgacgtccttggccggcgcattcttggcgtagaggtcgaactccgtccggtcggggaacggcgggaaaacccggggcaggagggattcctggatttggcgggcgatgcgcaattcgctctcgaccgactccttggccttggtcgcggccgcgaagtccctgatgtattggttgaggtcgccgaccatctggttcaagacgccggccaattcttggatctcgtccttcccccggatgccctcgattcggccggttaagtcgccggaggagatccggccggcgaaagccgccagcttccgcagcgggttggtgatgccgtacgcggcccagacgatgacggccaggatgccggccagccccatcgccatgaggatgacctgccggatcaactgggccttgaccggagcaaggatccggtcctcggggatcacggcggcgaatgtccaccggcaggtggggatgggggtgtagaccatccagctcttttcgccggtgttgaggtccttgaaggcgataacgccctgccgcccgcggatcatgtttttcccgatggcccggagatccggccggtccagcatttcggccaggctgaacagggattcgcgcatgacgaaatcgggattgggatgggagatgaacgttccgctccggccgacgaggaacgtgtatccggagatgatctcgatgccccgcatcgtcttatcgagctcggccagggagatgtcggcggtcacgacgccggcgaacgctccttcccggaaaaagggatgggaaaacgtgcacatcagggcgttcccgccttcggcgctgtagtagggctccgtccagtaggagctcttcaggagctcgggaatcaggtaccaatcggccgtatgataggcctcgaggccggccgtcccggcccgctccaagccgccggccgagcggaaaacgcgcggtgagcaccgttcccggcccggatccagggcatacggctcgaaggagatgctcatgccgaaaatgccgggatcgatcgccaggcggcgctccatgaggtcatagaggcggggctcgttgaggaggcgcatcgcctcgatattttcggcgatgatcagcggcgtctgggagatggccttgaaacgggaatccaggacggccgcgtgatggttggtcaactcgaggagataggaattcatccgttcgacggcggcccgcgagctctggacatagttggtcacggccacggccgcgtacacgaggagcagcggaaagccgatccagatgatcagccgccggacgatcggccgtttcacggcggacgagcggcggcgcatgacggtcattccctggcgaagtcctcgtaggcgggaacaacctggatgaatccctggcgcttcaattcctcggcgacgcgccggaaatcgtcccggcggagcacgccccaaccggccggatcggatccaacgccgtagacgacggcctgcaggacgacggtcagcatccatttctggtgggcccggttggtccggacatggtagcttgcgcagtaatccatcaggacgtccagggtctcttcctggtgtccggcggcgtattcccagcccttcaggacggcccgcctcattttccggcagacgtcgggccgggtttcatacgtctcgcgggtgcagtagacgccgtcctcgggaaaattcagcccgtaatcggaaaaaaagaaggggaccagctcctcctggtcgatcccggaaagatagatcttattgtattcattataatacatcgccgaggtcacatcgcaggctccgaccgcgaaagcgtcgatgttgtaggattgggggacgaggaccggcttgatgttgaatttgcggaaaaacgccgtcggctggatcgagaaatctccgccccagatggccacggtccggccgttcatgtcctcgggctgaaggatcccgctttccgtcttggcgacgagcatgagcgaggatttctggaggacctggcagatgttgaccaccggccggtccagggtcagcgtctgggagatccaggcggtgcagaagtcggcccgcccttcgaacacttcggtcagcgggctggtgtgctcgtcggaaaaacggatctcgacgttgagcccctcggccgcgaaaatccccttttccctggccatcaggtaaccggcgaattgagcttggggaaaccattgaacctgaagaacgagcgagtccggggattcccccgccggcgcggcggccgggaggccgatcgataaaagccccattcccaggagaaaaccggccgcggccttgctccgaagacgcactctcatccgtcctccgattcgcgaaaaaaggccggccccgcctggggaaattatcggcccgccctgcatcatatcgcccgcccctcggtccggtcaagggcggagaataagaccgatttgaaattcgggcgccgggcgcggccgagactcttgtcagaaatgcctaaatatgttattatgaattactaagctccaaggagcgaatccccatgggtgtcatctccccgattggaatcaaggtctgcttcatcgctccgtcgacgagcctggccccctccgaccagccggtcttggagcgctccgtccgcattctgaccgaatccttcgagacctcggggatctatctcagcccttatctttactcctccgacagccggatcgatcacgtgacggccgccgcctcggagagggcggaagaattcaaaagagtcgtccgggaattcgatctgatcgtctcggtcgccggagggaccggggccgaggatatcgtcccgagaatcgaccgccacgacctgaaggttatccggaagcggcgccccctgtttttgggatactcggacttcaccttcctcttgtgcgaaatcttcgcccgggccggcgtgccgggagtcctctttccttcgctttccctggggcgaggccataccggccggatcctatccctgctttccggccgccgggtgtccttccgcggatccttctggttgactcctcctccggacgggccgctggccggaatccccatcggcggcaacctgacgaccttcgtcaatttcttaaatcgggaaaaaccgccgcgcctgccgtggctcgagcatatcctgtttcttgaggatctgagcatcgacgtcgaggatctccatcgcctcctggccgccctccggcgtcaccgcgttttctcccgcgtccgggccctcgtcgtcggatccctttgcctggatgtcaatactccggaaggacggaccttccaagacagcacgttaaagttcctgacggcgtttttaaacgagatcctcaaaacccgccggaacgccggacggccgctgccgattctcgtggccgaggatttcggccacctcgtgggaccccgggagccggccgtgccgatcggcgggacggccacgctattccccgacggacaccttgaattcaagctgccgggcaaggccttgggtcctttccggaaacatccgaatcccgccgagccggctaaggacgttctgcccgttttatcgcccgttcccgaggcggctcccaaatgaacgcccgggcggaagcggcccaaaacggcgccggccggctcgttctcgccgtcattccccacgccggcctgctcgtgcccgaggaaatccgtccggaagacctggcggaaaactggtccgagctgacccggaacatcgattggcataccggcgagctgtacgatttccgcgatatcctcgccgacggccgggtcgtcttcccctactgcagcctggttttagaggccaaccgcgatccccgtaacctggaggcggccgtccccttgaaggatgtctggggacggccggtctaccgtcccggccgggagccgggtctcgacctgcgccggaggatggccgcccggtacctcgatccgtttcacgcccgaatcggcgaggcgatcgcgagcggagcgggccttgtcctggaagggcacgcgaccgtctcggcccggggggtgtccggaaaccagatcgacttgatgaatatccagctctcgcccggggaagagcctcttcggttctgccccgacgtcctgatcgaagcctatgccgaagagcttcggaagcgccttcccggtgtgagcgtcacgatcaacgcgtccgactacctctccgtctacgggcatatcggcgcccttcactcgatcgattcgccgaatcggatcggacgccgggccccgctcatccttcaggaaaccaaccaggctctttatatcaacccggacgggacgcccgacctcggacgcctcaaccggctgcgccgggccttcgccgagtcgctccggacgattacgaccgctttttccgcttgaaaagagcgaaaacggcgacgatgatcgccagggccagaagaacgcccaagatcgtgatcagcaggtttttcccggagatcgttttcgccgaggccgcggcctcggatgctttttcctcgttcagccgggaaatctgctgatcgcgggcggatacggtcccctcgaggctcgcttggagattcttgagggaagcgatatctccgtccttcgccgcgatctgttcatctttttccgtctgctgcttccgcagggagtaaatctgtccgttcaaacggcggactttgccctcgttttccttgttgagggcttccatcgatttcgacaggtcttcgttccgcgacttcaaggccgaaacatctgaattcagggcggtgatctgcttgtccgcctccgaccggctttcctcggcttttactagagaggctttcgtctcgttcagagtcccggtcaggatctcattgtttctttgaagctcggcgatcctctcctgggactgctggatctccgctccctgctgctcgatcttgaggaggtgctttttcgaggcacatcctgcgccgatcatcatcaataccatgaccgccgcgacggtgatcatgaagccgggattttttttcatggtcaatctctcctttcccgtcgatacaaaaggaaattaagccattcaagaaaaaaaatcaaggttttcgatgaagagactccctcgagcggaagaccgatcgatccgctgggcggagaggcgccgcgcgtcgagctccgcccggtgacatcgccttgacggcggatttgaagctgaaaaccgctggaacccggagattgaggggatagccccttttacggggaggcaactcgttttttcgcccgcttccggccgaagaaataaaacggcaggccgaggagaatgattcccaggccggccagggctttgccgggctggctgatcagggcgctgacggcgatgtaaagggaggccaggatgaagacgaccggcgtgaccgggtatccccaggtccggtagggacgcggcaggtcgggacgcttccgccggagaacgatgaccgcggccaccgtcaggccgaaaaagagccactggccgaagacgacgtaggtgaacagctgctcgaacgtcccgctcaggctcaagacgatgctccaggccgccagggcgaggatggagttgtggggggtcaggaaccgcgggtggagggcggccagctgcgggaacaggagaccgtccttggccatggcataatagacgcgcggcgagcagacgaaattctggttggccgccccgaggatggaaaacaagatgatgaacgagatgatcgaggcgccgagcccgccgacggcggcgttcatcgcctcggccgcgatccggtcggaaagggcgatttcggccgccgggaagacgtagagataggccagctgggcgacgacgtaaaaaacgacgcaaatcccgcagctgatcaagatgccccagggaagcgttctctggggattcctcatctccccggcgctgtacgtcgccgcctcccagcccttgtaggcccagagcgaggccaccagggcgacaccgaacgccccgagaaggccgccggaaggctccgctccgccggaacggacgaaatgagccgtatccccctcggcgaacaggaagatggctccgcagacggcggttaaagcaacgagcttgaagatcgtcaggacgttctgcaaatcggccccccggcggacgccgatatagttcatcaccgtcaaaaagaggatgaagaggatgctgaccgccttctgcccggccggcgagatcgcgaagaaatgaggcaggtactttgaggagaaggcgacggccaaggtggcgatcgcccctgtgtcgatgaccaaaaacagggtccagccgaagaggaaggcgaccgccgagccgtaggcctcgcggaggtagacataaacgccgccggcttccggcatcgaggcgcccagctcgccgaacgacagggcgccgaacatgctgaggacgcccccggcgacccagaccgccaggatcaggagggggtggccgacggccgcggccatgtccttggggacgagaaagatccccgaaccgatgatgccgccgacgacgagggcgatgacgtccccaaggcccaggacgcggggaaggctatgagccgacgcttgattcatggattttctttccggtggatccgccggtaatattcccagccgtcggcgacggtttgggcgacgggccgatacgcgtgtccgaactcgcggacgctcttggcattgtcatagtaagcgcgccagccgctcagccggccgtaggcgaaggtcagaagcggccgtttccgcgacagcgaaccggccgcctcggccaggcccccgccggccgcgatcacggcggcgggaagccgaaaggggcgggttccccggccgcaagcccggccgatgagccggatgacctcggcataggagagattagccccgacggccaggtagcgctcgccgtcccggcccttcccctccagggcgtcgagtatcaaatcgacgagatcccggacgtcgacgacggccagtccgcccgaaaacgaggcgctgatccggctgcgcgagatcatcccgtagaggcggttgtgcggcgtccttggatcatggtcgcccggtcccatgatcgaggcgggattgaggatgaccgcccggaggccgctcgtccggataagcttctcgacggcctcctccccggcgtgcttggaagccatgtaaaggatcgaatccggccaattgtacggcgtctcctcgtcggccggccggccgttcttgtgaaatccgaccgctcccaccgaggacaggtgaaccaggcgttggacgcccgtctccaggcaggcctcgccgacgacgcgagccccgtcgcgattgacccggaacagcctttcccggtcgcccttccagtaggaaatcaccccggccaggtggacgacctgcgtccggcccgcgaccgcggcccggacggccgcggcgtcggcgatgtccccctcgtggatccggacgccccgtccggtccaggagtccgggatccggtccccgggaagaacaaaggccgagaccgccgccggaccgtatttatccaacaggcgcggaacgaggaccgctccgacgaatccggtcgccccggtgacgaggagtctcaccgggaggagcgctcccgggccgctctccggtagatgaaggcgtcggtggcgatcccgacggccgcgtggatcgggatcacgtaaagaaaagatccggctccccaggcggccaggccgaagacgaaccccgccccgagggcggcgtaaagctccgtttccggatggccgatatgaaagagggtcgaggcgatcgtcgacacggccagggcgggaagcaggccggctgaggccgcgacggggaaaaacaggacgccgcggaagatgaattcccaggcggtgtaatagaaaaggaagtaacccagctcgtagccgatgaacgcccgccggcccgccaaggcgtctttggcgaagggatagaaatcgcggagccgcggatcgccggctccgaccgctccggcggccagagccgtcgggatcccggcggcggccagaatccatcctagccggacgttcccgccgctcaagcccaaggcgcggaagaccgcgacgggatcggcggccaggctgaacaccgcggtcaccgggacggccaggccgaaggtgaaaaccgcgagaaagtagctccggaccgccggcaggtcgccgccggcggcgtttttcaaaaaccgtctccggctgaaaaccgtctgaagaagggtcagggccacggcctcgtaggccaggagaattcccggccaggcgctcgtctcaacggatatggccatgggctctctcctcccgataccaggccagggtttccgcgacttggcggctgaaatcatcgtcagggacatagcccaactcgtcccgcgtccgggaaatgtcgtacgtcgtgtcggtcgtcacccgccggatccggtaagtcgtcagcttcgggtcgtaggacggacggattttatgaacggcttccatcgcccgggccgcggcgaaagccgcccaagcagggacataaattctctgcttctttccgaatccggcggccacggccccgagatattcgccccacgtcggcaggacgccgttggtcaccgcgtaagcccggccgcagaccccgtcgcggacgagggccgcctcggccgcccggcaaagattgccgacgaacgtgaggccgaaacgacggcggccgcggccgacgatgagcggcagcccccgctccgcctcgcggaacaagcgggccgaggtcgtccggtcgccggggccgacgacatcggccggacgaagaatgacgacgggaagcccgcgccgggcgtgttcgtcgaggagatactgctcgcagaggatcttgaagcgggtgtagggaagaaattccgcgggaacgcccggccgatcctcggagatgtccgtcgccccgtagccgagggtcagggccgaggagacatagaccagccggcggagaggaaccgtccgccttcgaaggagctcgaggagattgcgcgtcaggtcgaagatatgggagcggcaggcgtccgcatcggccacgtccgaaacgaccgaggcggcgtggatgacatgggccgcgtcctccgggatccggacggaagacgaatcgcaaaggtcgccccgcaccaggtcgaggccgagcccgtcgagaagatggagatcggaggccgggcggaccaatccggagaccttccagccggccgctagaaaatgccggcagaggttggaaccgatgaatccattggccccggtgatgaaaacggcgttcatgcggcttcctgggatcgacggccggcctttcggttccaggcccggaccatccccggcgccgccagtatagcaataatcccgagggcgaggccagcgacggagtcggtgacataatggtagcggcaataaacggtcgagacgtagaggctgaggatgacggggccgaggatatggaaccaggggcggacgtagcgtcgggcggtcagccacatgaccgtggccacggcgcaatgcggactggggatcgatccgccggcctgatgggcgtgggcccggatgaaatcgccgagaaacgtgaacaggccgccttgaagcgggacggcgtaggcctcgggcatgtaccagagcgggctggccacgggaaagaggataaatccgagatcgcaggccaggttgacgattcccaaggtgaaaaggtaatcctccagggctccctcgccgtgcttgaaaaagacgagcccggctaccagggggtaaataaccaggtaaatcacgtaggaaaacatcagccattcggtcagcggaggcgagacgaaccgctccatccaaagggtcggctggatcccgaagaaagcctgctcggcggccaggacgggccggtcctgccacggcatcagcatcaactgaagcggatgagtggcgctgtagagatacgcgaacagaagctggaccgaggcggtgcgaaggagaaagaaagggactctcgccttgattttcgaaagcaggaaaacgcaaagaagatacaaggcggccaggccggcgtttttcgccgccaggaaaaggggccggtcgaggcggcggaaaaataaaaggaacagggccgcctggacgagcaggccgccgaggacgagggcgtcggtgatttgaagggggaagccgaaaacgcggatccgccggccgtggagccgggcgatcgcgtttccccgaaggcggccgcggccgtccgttccattcatcggatcctcgccaatccccgctccgcataccaggccacggtccgccggatcgctccggccaggtcgtattccgggacgaagcccagctcgtttcggatgcgggaatcgtcgtaaatccaggagtatttccaggcggcgtcgaccgcttcccgggtcagaagaggctctcggccgcggatccgggcagccagctcggagacggccccgacggccttctgcgccggataaggcaccggaagatagacgcgccgcacgcccagctcggccgcgaccgcatccgtgatttcccgccaggcatacggccggccggacgtgacgaaataagtccggccgacagccgccggatgatcggccagaagaaggagcgcccggacgacgtcccaaacggcggcgatgctcgtccgcggccgccggtcccccatcagcggcttgattctcttcccgatcagcgaaatggagttgaacagctccttctgcctggggccaaggacgttgggcggccgaaggatcgtccaggggacgcggccggaaaacgaccggacggcttcctcggccgcggccttgcttcggccataaccggagacgggccggagaggagcggattcgtcgagacgtccgccggccggcgaaggcccggtcgcgctgatgctcgagacatagacgaaccgctttaaagccggggcggaggaagcgcaggcggaaagaagcgcccgggtcggccggacgttggccgcttcataagccgcctcgtccagggaggtgatcaggccgccggcgtgaaaaaccacgtccatgccggaaacggcccgggccagggagtccggatcgccgtaatcgccccggacgagagcggccgcgggagggagcgatcccgccccccggccgccggggcggatcaggacgaacgcttcatcgcggcgggcgatcagcgcctcgacaagatgcccgccgatgaatcccgtcgccccggtgacgagcgctttcatccggccgcctgacaacgcatgatgaaagcgattttatcagagtcggacgatttgggaaaaccttgtctgtccggatccgctcttaggacaactgggattcggccgcttccagaagctccaaaaccgcctccggcgtggcggctttcagaagctccttgcgcaggccgttttctttcagcagcctggagagcttccccaagaccttgaggtattcgccggccttgtcctccggggctccgaggaggaagaccaggcggaccggctcgccgtcttcggcgccgaagtcgaccgctggccgcagccgggccatggccatgacgatccgctccagggccctcgtgcgggcgtgggggatggccaatccccggccgacagccgtgccgccctgctgctcgcgcttgagcacatcgtccaggaaccggacgcggtcggtgatcaaacggctttcggccagccggtcggcgatgagggagaaagcccttcctttgtcggaggcgggcagatcgagcaggatcgcttgtgaatcgagatagtcggtcggacgcatgggattttgacgttttatcgctcaaacatacatcaaagcgggggaaaaggccagccgccgcctcagcggagcttctcgatgtcggcctccttgccgaccaggaccagcacctggccgtccttgatcacgaagtgggccggcggaagggtggtgacctggtcggtcagcacgtccttgacggcgatgaccatgacgttatagagcgagcgaagctgcagctcggcgatggtcttccccagaaagctctcggggggggccatctcgaagatcatgcagtcctcggagagcggcaaatagtcgaagacgttgggcgagatcaggctgcgggccactttgtgggcgatctctttctcgggaaggatgacttccgtggccccgactttctccaggatgatctggtgctcctcgttgggagccttgacgatgatcgacttgaccttcagctgcttgaggtacaaggtgatcagggtcgccgcggccaggtcgtcgccgaaagagatgatgaccgtgtcgtcctcatggatgccgatctggtccatgaggtccttgtcggttccgtcggcgacgatggctttcccggccaggtcgcgcacccgctgcaccgcctccttgttcttgtccacggcgatcacctcgaatcctttgtccgaaatctcgcggacgatgttttggccgaaaatccccaggccgatgacgacgcagcgcttcatggctcctcctatccgaccattacgccttcctcggcatagaccagtccccgccggaacgtcgaccaggcgaaggccagggtgagcggtccgacgcggcccatgaacatcatgagcacgatggccagcttctggatttcgttcagggcggcggtgacgttcatcgacaatccgacggttccgaaggccgacagcgtttcaaacatgtattcgacgaacaagtggcggctgtccgggccggcgccgggcccggcggccagcagcaggaccgaggcgatgaccagaaccgatacggccgaggccagtacgatggcgattgtccgcccgaggatctcttggggaacggtgcgccggaagatggtcacgccgtcgcggccgcggatgcggttgatgatcatcagccccagcagggcgaagctggatgtcttgatcccgccgccggtcgatcccggcgaggcgccgatgaacatcaggatcatcatcagcaggatggtgggattggccaaggcggcgatgtcgacggtattgaacccgcaggtgcggggcgtcaccgactggaacaacgaagccagcacgcggccgggtccgcggactccaaccaggacattgccggcctcgaagagatagaacagaagcgcgccgcccgtgatcaacgccccggtggtcagcaacaccaccctggcgtgcagcgagaggcgcttctgccgtccgcgccagcggtcgatgacctcatacatgacgatgaagccgaggccgcccaggacgatcagggagacgatcgccaggttgaccaccgggtcgtcgcggtagcgggccaggttgtcggcgaacagggagtagccgcagttgttgaaggccgacacggcgtggtagaccgcctggtacagcgcccggcccggcggaaaatcggacaggaaccgcaggaaaaggaccagcgtccccgccccctcgatgacgaaggttcccgacacgacgaagcgcaggatgcggaaaaaatcacgccgcggcgtgtggagaaacgtgctttgcagcagctcgcggccgcggaacgagaggctgcggcccatcagcccgaacaggaccagcgagaaggtgatgatccccagcccgccgatttggaagagcaggagcgtgacgacttgaccgaacagggacagatcccggccgatgtcgacgacggtgaggccggtgacgcaaaccgccgaagccgaggtgaacagggcgtccattaaggaaagaggctcgcggacggacgccgcgggaaggagcaggagcagggcgccgatcaggatgaccagcaggaagctgagaatgaataggcgcgccgggctcaaccggcggacagcggggcggcgcgcggtcttgaaacgcttcatggtctctcccgtctcctgcgggcgcggaaagcggccccgccgatcctccttcggccttgtctttcatcgcccccgaaggggtatgccggcttttccccgaggaaacaatcccggagaggcccggcctgaaagcggcggagcctcgtcagcccggccgcggttttcttaaagccattcttcctttcgccgcaaagaataaatcgggccggaatcgatgtcaaggacgcggagaacgcgggtgacgatgaaaacgagcctcccggcgagccgccccggaaaacctctcgagcgagtttccccgccggcggtgttcggcctaataaggaaacgatcccggccggggtcgggcttaatcccggcggcgaggctcgcttaaaaaatcttctttcttaaagaaggacaggcctatgaaaacgaagggaagctctcccttttgaagataatagcctggactcgcgatcaacgtatagagcagcatccccatggagagggaatgcgcttgagttccccagggccgcctcttgatcagcccccagcccccgatgaggagcagaacggccgtcgataactcggcggcgagatgaaggttgatttcaacgggcttggtcttgagctccgggatcccgccggatgcaaaaaacatcgtccacattccgatcatggatacgccgacaatcagcgaatagagaaccgcccatttccttattttcatctttgtcctctttacgcccgtattaaagacaaaggctttttgaaatcttccctcatttatcggttttccccggccgcgtcaaccggcggctgaagatctcctctcaaaaccggaaaaccagtccggcggcggcctccaagccccccaagttgacgtccggctccagggacgagcccctggccgtcggaacggacgtgtattctccgcggagggaaagcgagagaaagcgaaagacggcgtattctccccccgcctcggcgtaccaacccgccttttttccgctcccgccgaggccggggacgtcgacccaccgctcctcatagcgatcggcgctgccccccgctccggcgaaaacggcgatccgtccgagatcgaaggcatagcgcaagccgagccggatcgaggtcatctcgaactccaaggcgtattcttcctcgttgaaggccggtccggcgatcgccgtcgcgcccccggctttgaccgtccgccacccggccgcggcccagaggccgtcgatgagccggacccggacatgagccgataaggcggagatcccgtttccatacagcgtccggaaagccgcctggcccgcccggaacatccccgcctccagcgatacggccgcgcgtggccgtccggcggccgtcgaagcccgaaggccggccggccccatcccgagaatcagccaccaaaaaacgggcgccgcccgcaagccggctttaattcggaagcgcgtcattgttttgatcatcgcgaacctcgtcggagccatcgctctccagcccctggccgtcgacggccgtgacctcgtagaagtaggtcgtcgccgggtccagcatcgtttcggagaaacggggctcgctcaacaatcgggaattgatcttcacgtgccccccgccggacgtcgtcgtccggtagacgttgtagccggcgacggacgccgggccggcgtcccaggcgagcgaaacacttttgaccgcggcgaacagcgagctgatgatctcgctccgggcttgaagccccgtcggcggagcgggccggaccacatgcggccgggccaggtcggcggccgaggccagcgaagcccgggtcacggacgtgcaataattcatgttcagtttgtccagggtgtcggtcgtctcgtgatagtagggattccggccggccgactcctcgatggcgcacagggcggcgaatccctggtcccaaaaaggcgagtggtcgctccacgtcgccgatgagtcggtgatcttggacgccgccagcggagcgtaaatctcggccgcctcgaggtattgatcggccagccagcggctggccggattgacgtacacctcgaggaggggatcgtccgagtccgtgtacgagatcatgtccatgttgatgacgccgacgatccgctccccgcgggacttggccctttgggcataaaaggagctgccgtagagcccccattcctcggccgaaaagcagatgaacttgacggtgtagtcgagcggcgcggcggccagcacccgggcgatttccaggacggccgccgttccgctggcgttgtcgtcggccccgggggcgagggtttccggctcgtcgctgatggaatcatagtgggcgcagacgatgacgaccctgttcgggacggcctttccgggcagggtggcgatgatgttccggctttggcgctgagcccaggaaaaggtgaacgtctcgtactcgcaggccaagccgagctggacgaagcggttataaagaaacgtcccggcgttctcgcaggcggcggtcgaggcatagcgcgtctggaaattctgaaggctctgaatggtctcggtcaacttggacttcgaaacgcgggcgacccattcgaagatccggggatccggaacgatcgcctcgaccgctccggccgcggtttccccggcgggcgccccccgcgaccagacgacggaccggtcgagatcgagccgtttcagccggaaagccggagggataatctcgcggggatccccggaggccggggaaaagagccagacgcgctcttcgagaggaaccgccgtcccgagcccgacgagaatgtccccctcctcgggccggggcgttcggacaagaaaatagattttcccttccgccttcccgtcgaggacgaccgccggaacgccggcttcggccagttccccggggagagcggcggggcctgaggccaggaggcaggtttgaagctcctggacgacaaaaagaccggcggccgcatcggccgacaggcggtccaaatcggcccgctcaatccggaaaaggacggtgtcttcgggcggggcggcggaggaaaaaacgagaaggacggcgaccgcggcgacggccgcggcccctccccgagggcgacgatttttccaggccatgaatcctccccgggatttgattccggcttcagccgaagccttttccgctccgccgcggttaggaatccggctgatccgaaaatcccctgccgcaagggtagtagagcgcccgggggctgtcaaccattgatccgtcccgccagcctgagcaagccgtcgaggatcgtcagcggatggggcgggcagccgggaatgaacaagtccaccggaatcgttttctcgaccccgttctgaacgtccggaagatccgcgaacaccccgcccgaaacggcgcaggcgccgcaggcgatgacgattttcggatccggcacggccgcgtatgtcttttccaaggccgaccgcatgttttccgtcaccggcccggtgacgagcaggccgtcggcatggcgcggcgacgcctcgaattgaatcccgaaccggccgatgtcataaacgatggtggtcagcacgttggtgtcggcctcgcaggcgttgcacccgccggctgaaacctgccgcagcttcaaggaacggcccaggaggatcttgagtttcttttccagggccgcggcccgcctgatctccggtccgccgacgaccaggtcgttcctcgaccgcacggcctgccggtaatcccggccgaaccggacggcccccgccgggcaggcccgctcgcagcgggaacagaacaggcatcgcccgaggtcgaggctcagccggccgtccgttttcgccagggcgcccgtcggacactcctcgaggcacgcccggcagccggtctcgcagccggcctcgttcaaaatcggaaggccgcggtaccgatccggcagccggggctcccctttcgggaaagagatcgttcggtgtttttgctgaagcctggcgagaagggctttcactgcttgatcttccttcgattgaggttacaggtcatggccgcaataggataaattgaagctcttgttacagagcggaaaatcggagacgggctggtttctcatggccagggccaatccggtccagttgagaaacgacgggtcgacgattttgtagcggctgaagcgcccgccggaatccgtgatcccgacatggcagatccggccccgccagccctcgacgaggctgacgcagaagcggtcggccgccggcgccttcacttcgacccggaccggccccggcgggcatgtccggagctgttcgaggataaaggcgatcgaccgttggatttcgagccagcgcacataagcccgggcgaaaacgtctccgctgggccaagtggaaacgggcatctgcgaaaaacgatagatgccggaagggaaattgaaccggatgtcggtctccaggccgcaggcccgggccggcacgcccgccaggccgagggtccggcattgatcggcggtgagaacgcccgtctcctcgaagcgggccaggaccgagggcgtgctccaaagcagcttgacggcgacgctcacgtccttcccggcccgggcgagcttttccgagagcgccccccggtcttcctccgtcaagtcgtcatggacgccgcccggggcgaccaccccccggccgaagcgattgccgcagagggaggcggtcatgttgagaaaatcaccccggatccggccgcagaaggacgaggtcggtaaataaccgacgtccccggcgagcgcgcccaggtcgccggtgtgattggcgagccgctccagctcgagggcgattccccgaagcgattgggcccggggggccgccgggacgccggacagggactccaacatctgaccgtaagccgtcgcatggccgacggccgtgtcgccggcgacattctctataaaatggagcgtccggacgcccggccctccgatcagggcccgctcgatgccccgatgctgataaccgagggagatttcaagatgcagcacctcttcgccgtggcactggaaacgaaaatggcccggctcgatgatgccggcatgaacagggcccacggcaacctcatggatttgctcgccttcgacttggaaaaagtccatgacggacggaaggatcggccgcccttcgctccgtccgaaggcgtcccggccggggacggaggaacgatggaagcggaccggcttcaaccacggatggccgtgcggaacgatcgcccattgttccgcgacttccctttcgaacaaatgagcctggggacaatccggagtgatcgagggatattcgtccgggacctcggtcgaggaaacataaagccggcccgtctcgtcggccgccaagaccgcatagagacggaaccggccgggacgcgagggaacggcgaacagggaggccaagcccaggcccgccgccgcggcctcgatgacgaacgtccggaattcctccaccccggcaaccgggatgtcccccgttccgacggactggccgttatagatcgcgacggagggcccggtgttcatcagcgtcctccgaacgccgcggcgacgccgtgaagaaggcggctgaccgcgggcgggatatacaagccgagcagcagggtcgcggcgccgagggccgcgggaggcaggagctcgagcagcgacgccggcttggcgccggccccggcctcggcgcttttccgtccgtggaccatgtttaaaacgacggacgacatggccgcgaagatcaaggccagcaaggccaggaaggcggcggcgaggccggtttttccctggtcgatcatggccttggcgatcgtgaacttgctcaggaagatgccgaacggggggatgccggtgacggccaggaagcccgccgtccataacatgccggtggcgggcatgacggtcaggacgccgctgacctttccgaccgacttggtcttgtagacggcgaggatattgccggcggccaggaacagcatcgccttggtgagcgagtgattcacggcatgaaacatggatccgaagacggcgtcggcgccgatgccgacgcccagggccatgatgccgacatgctcgacgctcgaatacgccagcaatctcttgaaatcggcctggcccagcatgaagaccgcggcccagccgatcgaaaccaggccgaacaacacgaacaatccccggcagaagtccgcctcgcccgcggccgcgcagacctggtagcttctcaggatcccgagaaaagcgcagttcaggagcgcccccgaaagcagcgcggaaacgaccgagggggattcgctgtgagcgtcgggcagccaggtgtgaagcggcgccaaccccagctttgttccatacccgaccaggaaaaacagaaaggccgccttgagccagggaacgtccaaagcctggccgttttcgatgagaacggacaagacgatggatttgccggccgtcccgggatttgaggcggcgacgaccaggaaaaagttgccgagcagggccagggcgatgccgaccgagcagatgagcaggtatttccaggtcgcctcgagcgagcggcggtggcggtgataatagatcaggggcgcgctggcgagcgtcgtggcttccatggccacccacaacaagccgaaatgctggcagagggtgaccagggtcatggtcgcgaggaaggccaggaggcaggcgcagaagatcgcctggggcgcgttcgtgaagagcaggccttccacgaaatcctgctgtttcccgccgggatccccggccaggtagccgaaagcatagatcgagcaggccaagaaaaggaggctggtgatcgtgaggaacaaaaggccgggatcatccagaaggagccagccgttcaggagcggtttcgggcgggccgtccaggccgccagggtgaccgccgtatggccggccgccgcggcgacgaggacgacgcgcctcgccagggagccccggatgatgagcgaggcggccgcggccgcggccgggatcagcagcagactccaaatcatgatgtcaagtcctcaagttggacagcttgtccgtatcgatgtggtcgaattctcgattgatatgaaagatggcgatgcccatgatgaacacggccgcgaacacgtccagaagaatgccgatctcgaccaggaacggctgttcctccaccagggccacgccgaaggcgaagatgccgttttcgagaacgaggtagccgagcacctgggtcagcgcctttttccggctgatgatcaggagaaagcccgacatgatggtgaacagggcgacgggaacgagcagggacgaggagacgtcgaccggccggggcaggcgcgagccgagccacatgcagacgacgagggcgaccgcccccgcggcgatcgaggcgccgtagccgatgaacggctcgatttcacggctcgtcttcagatccctcagcgttttgaccaggatcgcgggaaagacgatccccttcaagccgatcagcagcagggaaaagaggatgagatgccatcccggccgccacccgttcagggcgagaggcagcagccccagggcgattccctgggcggcgacgatgcggatgcacgtgttcaaccggctgatgccgagcagggcgaggttcgccagcaccagcgtgatcatgaggatgtctacggaattcgtcatgatgccgccctaaaccaatatcgccgccaggatggaaagagccgccgcgccgaccagaagctggggcacgcgctggagccgcaggcgggccatggaagattcgatgagtcccacgaccgcggccagaagcatcatcgccagcagggccgcggcgacgtccgcgagccgaccgccgccgcgcacgggaacgatgatttgggtcaggagcgctcccaggagccacattttcacggccgccgcatagtggatcatgccgaggtcgggcccgctgtggtcgagcaccatcgcctcgtggatcatcgtcaattccaagtgggtgttcgggtcgtcgaccgggatccgggcgttctccgccaggaaaacgatcaggagggccaagccgatgagaacgaaggcgggcccggctttcggccagtagccgaagtcgatcgcgggaaagatcttggaaaaagagatttggccggtatatttggcgatgaccgccagcgtcaggagcaggacgggctcggcgagggccgagaacgccgcctcccggctggcgcccatcccctcgaagctcgagccgctgtcgagggccatcaagatcgtgaagaagcgggccaggccgaacaggtaggcgaacaggatgagatcgccgttgaacgacaagagaacgggcaggccgccgaagggaatgatcgtcgcggccgtgacgaccgcggacaatcccacgaccgggccggcccggaggatccaggaagaggactcgctgtacaccgcgcccttccggaacagcttccggagatcatgatacggctggagcaggggcgggcctgtccggcccgcgcaccaggccttggtcctgttgatcacgccgatcaacagcggggcgaaggccagcccggccgcggtgttgagcaatttcaataggatcgtcatttcgtcaaagcttccatatcaaaagggccagcagggtcagggcgatgtacaaaatgtagatttgaagccggccgtgctgaagccatttgaatttgccgaggaacgacgtgatccattcgaaagccggctcgtggagatactcctcgctgacatccttggtgtccgtgtggaaatgcgaccggcccgggaagaggccttccgggagggaaacgtccttcttgctgcgcaggaaaatcttgaacaggtcggtcaggggctgggcgaacgagctggccgtgtactgcattttaggcgtggggcgggcatagccgcaatcccaggtcggcgcccgccgcacgctgcgcccgcgcaggagccgccggcggaggacggcgaagaacgccgtcacggcgatcaggacggcggaaacggagacaaagccgatcagaatccgggtcgcgtagcccaggacgacgcgggccagctcgtcatcgaatcccgaaatcagggaaatcggtcctttcacagattggatgaccagcggagagagcaacccgagcagcacgcacaggaccgcgagagccgtcgtcgccgccctcatcccccagccggcctcgcgggcccgttcggccgcctcgcttcggggatggccgagaaagatgattccgaacgccttcgtgaaacaggccaaggccaagcccccgatcagggccaggccgccgatgatcgccagctccgggatggccgccttgaatccggcgtcgatatcgccccggaacacgccgaggtaaatcaggaattcgctggcgaacccgttcaggggaggcaggccggaaatcgcgatcgagccggtcaggaaggcgaacgccgtccagggcatccgcttgatgattccgccgagggcgtcgatctgcccggtcccgcagctctttatgaccgaacccgcgcccaggaagaggaggcctttgaacacggcgtggttgacgacgtgaaacaatccgccggcgaagccgagaacagccagcgtcggcgcgttcatgttgacgcccagcagcccgaggcccagcccgagggtgatgatgccgatgttctccacgctgtgataggccaggagccgcttcaaatcgtgctgggccaaggcgaagagaaccccggcgatgcccgaaacggccccgatcgcgatcaatgtccagcaccaccattcctggggcggccccaggatcgtcaacgtccggaccagtccgtagatgccggttttgatcatgacgccgctcatgaccgcggaaacatggctgggggcggccgggtgagcgtacggcagccacacgtgcaggggcatgaagccggccttggttccgaagccgacgatcgcgagcaggaacaaggcgctcgccagcgaagacgggaccccggagatcgcgtcaaaattcagcgatccggcgtggcggccgagcaggaggaagaagacgatgagaaaggcggtgccgatgtgcatcgcgatcaagtagatccagccggcgcggcggaccatgggcttttcatattcgaaggtgaccaggaaaaacgaggccagcgacatcgtttcccaggcgatcagaaacagcacgccgttgcgggcgacgacgaccagcatcatgccgatcaaaagaagattgtagaaaaaccaggcgaccccgaggtttttccggtcccggtaagcccggaggtaatcggatccgtaaacggcggcgatcaccgacagcccgatgatgggaatcagaaaaaaggccgacaaggaatcgatctggatgtaaaacgagccgtaggggatattccaattccactggagcgaggcggcgggggcgccgagcagaatccggaaggcggggacggcggcgatgactcccccggcgacggccccggcggccccgagcccgtccgccgcgcccggcttcctcccccacagcagcgaggccagcccgcctgagaaaatgacggccaaaccaagcaggaagaggaccacctacgcgctccgatccgctttcgaggaaattttggattgatcgagcccggcctcgacgcgggcgatttcggcgaaaatctcgtttcgtccgccttgtttcaggatgagtcttctaaaatcgccgtcccggagggcgaaggcgatccgggacagcagatggagatgcgatttcaccgtggggctgacgagggtgaaaaggcagttgaccggccggccgtcgagcgagccgaagtcgatggccttctcgaggaagcaaagggaaaccatgggttcggtgacatgaaggacgatcgggttgcggacgtgcggaatggcgatgccgtcgcccacggcggtggaggcgatcgcctcgcgggccaagagcacctgcaggagaaaattccggtccacttcccgcggcagcttcatgagatcgaccacggttccgaggacggcttccttgtcgccgccttcgatgcggtaatgaatgccgcccgcgctcagagcctccgccaagcctttgctttggccggcctcctcgctgttttcgcggaacaaatccacggaaacgcccaaccggcgggacgtcgcccactcgaggagctcagccttgttgaaacggtactggtttccgacctggtaagcgggcaggctgccttgttttagccacctgtaaatagttttttcgcttatatttagaagcttcgtgacgtcttttacggtaagctgcatttctttttgctacaggaataaaacggctgagccgttttattggacattaaaggacactctatccgtcaagtcatatattgtcaaggcggcgtttgataatacgtccagctattcttcaataataccggtccatcgcccggtattgaatggcctcggccagatgagcggcggagatctcctcatacatgaatatcaagttcctcattcgttttttccggcaatgatctgataggtctcgagtccatatcgtttggagagggcggacgtcttcctttcaatccgatcgtgatgtaaagccaccacccggaatccggcggactcgaggaggaaagtcatttcctcctcggagtggcaaaaagctgaaacgctttctttgccgtgcaggagattgtcaatgacgtattctgaaacgccctgccttgaagccgcatgatgcagaaagagaatcccctccgggacaagcatttttgcaaatccggataacgtgctcagcgccgcctcgccgggaacatgaaggaaactggcaaaggcgaatattccgttaaaagacgcccgggcaaagcaaggaagcgtcatgtccatcgtcgcgagagcaacacatcttccaccgttctttgttttgattctgtcaagaaattccgtgacgatatcagtggcgatgactttcagtccggaagaggcaaaggctagtgaatcaaaaccgaggccgcatccgacatcaagaatccgcgggcctttgagatgtttaagaaaaagcgctctacacctaaaacggaattcggcgtcccggtgtctttcttccgatctctcccaagcattgacgatcccgcggtaagccctgaggttgttcgcgacggctattcttatacgatcggaaatagcgttcattcgtcctcctcgagagaaataatcttttggcagattcgcgagagaaaatcgttggaatgtgaaatcaagaggatggccaggccgtggacccgccgccaggaaaaaatatattcatatatttgagtttggttgactggatcgagcgatgaggtcggttcatccaggagcacaaaccggggttcgagcatgaaaacgcggatgagagaacatctctgaatctgaccaggactcatctcaaaaggatgcctgaacattaactctcgttcaaggttgagctgatcgcacatcttgaaaatccgctggcggccgccgtcggaccttccattcaccttcagcgtctccaacaaagcgtcgaggatttttcgttgcggattgaacgccatggtcggctcttgccctatccagccatagaaaggcctcaatcggcggagagacatccggcggatgttatttcctcgccagaagatatccccttcccatgcgggcgacaaaccaagcaaagctttgccaagagacgttttcccgcaaccgctgggaccggaaaggccgacgatctcatttgccagaattgaacaagaaacgggaggagtgatgtaattccgccggggggacaggaatccatgattgtaaaaaactcggacattccgggcctccagcaccggaagactcccgctcatttaaattcccggtctgtttgactcagacacccgacgcccttttcctcccaagacgaaaaggagcaatccacaagccggcgggtataagggtgatcagatcttatccgttgatcggaacacgttccgcgatcgatgatttcaccccgcttcatgaccagaaagcgtccggcaatcttcgaaaccaggtcaaggtcgtgggtgatcacgaacagggaagcctcgcggatatcgaggagagcctcaatcacgagataacggttgcgatcatccagccctcgggtcggttcatccacgataagtagatggggattattaatgaggctcatagcaatcatggcccgctgattcatccccccgctcaactggaacggataccggcgataggcatcatccggatctttgaagccgagtcttttcaacagggcgagcgttatttctttggcttgggaccggtctcccggatgatgaacgcgataggcttccgcaatctggactcccaccgtcattacaggatcgaagaaccgttcggcgttagaccagcagacggcgaggcggcgtccgcgaagcttgggaacctcccggctgttcagaatttcgcatccctcgaatcgtatggaccccgtcacccggacgttttggggaaggagccccaataccgccatagccaggaccgtcttcccgcatccgctttctcccatcagggccaagcgctccccgggcgcaatcgtcaaagacgcatcgcggacggcgaccctatctccgcaattggtttcaaatacgaccgaaagaccgatgatttccaggatcatgggcggcgtccatgatcatagagacaagataaatcgagctttaaaaaaggatccatcttgactccgctcaatcctttcctgaaggcataataatatttttcgtgaaacagcggaatgatcggcgtctcgtcacggatcttgtcgagaagcatattgaattgccgttcctggatcttcgcgtcgggggcattcatggcctcaagaaaaagcttatcgatctcaacggaccgataatgggtagagttgccgatccccctcaccttcattccttccgaaaaaacaagtcttctgattagaagctccggcgttcccaggggcatggagaggggataaagggtgaggtcgaaatctcctttttcaacggctttagaccaagcgccgccctcccggacatcgatatcaatagtcaatcccatctgggaaaagatatcggccagataatcggcgacatgcttgtatccccaggactgggcatccccctgattgagcaggaattttaaacgatgtttttttaatgttttcaggctggtcctggaaaaattcatattttccgctttcatcggaaacctgtgcttgtcccaacgcattgctctgccgatgaaaaaatcgtgggccggaatccctccgccccggaggataagattgacaagctcctccctgtcgattcgtccggcaaacgcggtcctcaacgccttgacgctgaatggttctcgggcgcagttgaagagaagataatgcgtaatcgccacgtcctgggaacgcacgacgatgtcaggccgcccttccaacagatccttcagagacgccggcacgccgccgtggtgcgcgatcatatcgatgtcaccgcggaggagcgacataacgcgcacaatcggatccggaatgatcctgaattcgactgcgtggaaatagggttttctcccatgatatccgtcgaaagccgacacgcggtcgtaccggccaatccggctttccttaaagatatagggcccgctggctacgggtttaattatctttccggtctcatcaaatgcggacggactgaagattcccgcgaagtagtgaccgatccggttgggaagatcgacaaccgggcgggaaaagaccagccggaaggccgtttcatccagggcatccgcggaaatcaggtggagaaatgtgccatagtaatcgaattccggatgatttttcatgcgttgaacgttccagacagccgcggcagccgtcaaaacggttccatcgtgaaagaggacgcctttgcggaggcggaatgtccaagtttttccgtccggtgaaacccgccaggattcggcaagggaaggccgggcgataaaaaagtcatccagttcggtcaggctttcccagacattggcgttccgctggatcatgaccgggttatgattacccagattcaagctgcccccgaccccgatgatgagcatgtccctgcgccgtcccgatggcgaacaggcgattcccaaaatcaggacgatcggaagacacagtcggcggccgatttttctcatggctcgatttcccccgcccttgtcccgccatatgagaaacgactcgctttctccacgaggtaaaggatttttttcgcgtcgaagaattccctcaagccatccgccatcaagtgaagacccaaagcgaaaaatccgatgaatgccgaaggaaagacgaagagccaaggactcatgaggatgaaatccctggaatcatgtagcaccatgccccattccggaatttgaggagacaggccgagccccaagaaactcatggaaacaatgacaaacacgtcaccgatcagggaaatcacaaacaggatgagcaacgacggcagaacggcgggtacggcatgtaaaaaaaggttccgcgtctttgaatatccgacggaagcgtttgccgttatataatcttgatttttcacgatcgatatttcatttctcacgactctcgtcaacggcgcccaacccgtaaggacaaggaataaggcaaggcgaacagcacctcctccaaaaacaccaaggaaacagaccgccagtaaaaagcccggtaaggccagcagggcatccgccaggcgcatgatcacgatctctatccaacctcccaggaaaccggacaaagcacccaacgaaaccgcaatgaccgcattgaaaacggctatgatcaaggccaggcccagagtagtcctcgtaccgcaaatcaagcggctcataatgtcacggccaaggggatcggtgcccatgatatgatgccgatctggagcacggagtatctgatcataatgagtttcatggggagagtagggagccaaccacactccaaaaacgcccatcatcagaaagacagcgacaagcgccgctccgacgataattctcgccttcattcctacttcactccggacgcagccccccgaggatcgataattcttaccaggcaatcggcgccgaaattgacgataacgacggttaatcccagaaacaggatatacgcctgaatcaccggatagtcgcggctaacaacagcctcgaagatataactccccattccagggagggcgaacagggtttcaataaggacaacgccgccgagaagggcggctaacctcacggcaagataggtcaccgccggcgtcaaggcattgcgcaggccatgccggatgaccgcgccgcggaacgtcaatccctttccgagaaccgccatgaaatgctccgtatgaatggcttccagaagcgtatttctaattactcgggctaaagagaaacccatggttcctcccaaggcaacgatgggaagaacgaatccgccgcctccggccggtccataaagggggaaccatctcaaacggaaagaaaacacatagatcaagagaattccaaaaatgaaaaccggcacggattgaaatgccgttgaaagcaatctgacggcatgatcggcaaggcctccttccctgaggacactgagagtccccagtcccaatccgatccaaacggccagaacccatgagccggcggcgatggcgatggagacggggatccgagtccgaaattcgcttataatcggccggttcgttttcaatgaaacgcccaggtctccatgaacgactgatcccgcccacaggcaataccgtttccaagcgggctggtcgaagcgatagaccgaatggagtctgcccagtgtttcctggggaacgtctttggaaacactccccaagatcatctccgccgggtcgcccggagccagctctatcgcggcgaacgaaatgaggctcacaatccatagagtgattagagacgaaagaatccgctctttcacgccctgtttgcctcgtctcagaaatcgaagtgatacgaaagattgaactcgacaaaccggccgggcgcgttataaatgaattctccgtcatacttcgcgtcggtcagattgtcgacgccgaaagacgccgttattttatggttgcccaggctaaacgtcttccacacctttgcatccaggcaataatatttcttcatatggaaatagtcgagctgagtgttctcatcgtcataataccggtcatccgaaaaacggccggaaagcttggctccgatccccttttcccggttgtcatatgccaagccgatgctcccaaagtaatccggagagtttcgtaattggtgccctttgtttacaaccgatttagtgatctccgagtgattaagcgtggtgctgataaacacagacagcgaagatgccaatttccaattgacgccgagctggagccccctgattcgaactctgtccgaattagaagtccgaatgatttgaactcccggaagggtcgggtgctggtcatagacatagctcatggcatccttgatcgttcccgaatagaaggtcagttcaatcgttccgcgattcaaaggatcgatataatcgaggccgaagtcggccatggccgtcgtttcgggtttaagtccgggattcgcctcccgccaaatatttccggtcgaaatattctggaagaaccaggaggcagctcccggccagaacgccgtaccgaaggatgtacgcaccccccaattgtcggcaagacgatatttaaaagcgccacggtaggtcaccgcatccttcgtgacggcaggcggcgttctgttcgttgacccgctgtcatagatattgtcgtatttccaacggtcgcagcggaggccgaagagaagaatcgcccgttcgtggaggaaccggaactggtcttgaacatagaatgccgtttggacgatgtcatattccgtatgagacagggatgtcgttccggcgggattccagacatccgacaggctcttgtcatagatggaggacactcctgccgtaagcgtatgattcttcagaaacagaaaatcggcttgaagatccaccggcgcccgcgtgtattgagattccgtcttccgcgtgattgtcgaatcgtatatatagctccgattctcatcaatgggagcaaaaacatagcgtccattgatgacggaattaagcaccgcgaccgctcctttcgtgctctgaccctccgagagacgggattgataacccacgcgcaaagtgaaggctccgattccgttcacgggaacgaatagcgatccggttccgatgattcgcgttcctccgctctgggaatttgttttgccgccgtaaagatcctcgtcgaaaatatgcgctcccatggcgaaccggattccgcttttcggattccggtagccgatccggccgtaataatagaggttggtatagctctggttgtcgatattgacgtagtttaaatacgaaggatatccttggctcattaaataggttcccgtttccagatcggtattcctgtatccgtccgatttatccatggaaaaagatccatagaaatcccaatttcccaggactttaccgatcgaaatattcggccgggcggagtgaaacgtaccataggacatgccgactgtgatgcccgatctttctcgcgcgctgatggaacgcatgttgaccgctcctccgctggcattcggcccgtaaagagacgaggaaggaccgaacaggacttcgacggcagacaaattcaatggattcacggcaatgctgaccatgggctccgccaaaggctgttcatcggtcatataaagggttcgaccgatgaaatatcccgttcctctcaagtggatccacgggggaatattacggttgccatgccccacggagacgccgggaagatgtcggatgatttccccgacattcggattgctgtatgtcgccgtctcgatcaaacgcgtattcactgattcaacattgacagggacattcagggaatcggtctccgtcttcgtcgccgtcaccacaacctcgaccgtcttctccattcttttgagttcttgttcccttttcttatccttctcaggcgcggaacgttccttttcctgagcttgaattcccgcggcaaacaaggcgcaaatcaggaaaagaatgaaaacggcttttttcatattacgatctccttttgcaacaggtgccccccgcacgtttcttgagagggtttaagcgtgccacgattttactatttcgtaacactgttaccataaaacattcggcaatacaagagtatttttttcaatccgacaatgacatttgcgcaagaacgcccctgggcgtttcaattcgttgctccacagccgttccttttaacaaaccacgttccgtctccccggggaaacgtttcgatactcctctcactgaagcgtccagctggtatgccggaaaatacttggagcgggttgggtaaataaaacctagcgttaaatcccatagaaggcgccgatcagagtctccctgcatggggaggacgatatgtctcggccctctattccaggcttcgagtaaagatggagcacgctaaggccgcggtggccgttgccagccgattggcggatgccacattttagattcataaaaagggagaacctaataaaggaagaatcgccagaaagccggtttcgtccgcccgggagcaaacgcgatggttcgcatgaagccttgagcttcaaaaatcggatgagatcctccgcggggaagatgctcatgctgccttgacggcaaatgcatgcgtctgatgaaacgggtaaagagcggcgggacgaaactcagcttattcgaaacaaggcgttgcaataatcaggcttgattcttccggcgctttcattcaagcaaccatcacactgtacactagcaccctctggattgcgcataggattctttaacttcgggctctttaattaaatcgaggttgaaaatcctcagcatgaatgagagagatatttttaaaagcccgcaagggatgatgtcctcacccgccgacaatgccgagcttcttcaataataccggtccatcgcccggtattgaatggcctcggccagatgagcggcggagatctcctcggctcccgccagatcggcgatcgtccgggcgaccttgagcggccggtcgtaagcccgggccgagaagccgagccgggagaccgcttcctccaggagattttcagcctccggcccgatccggcagaactcccgaatctcccggacccccatctggacattggcgaatatccccttgcccgaaaaccgcgccctctgccgctcccgggcggccgtcacccgggccttgatcgcggttgaggactccgcctccgctttcgacttgaaatcggcgaatttcaaggccggcacttccacttggatatcgatccggtcgagcagcggtcctgagatcttcgcgtagtatttcgaccgctgggattcggtgcagtccttctcccctccccccagcccccgaaagacatcctcgcacccttgcgttgcctttctgccatattaccttaaagaccaaaaaaccggtttccggggagaaaatccccgatgtctgccggacttggggcgattggatcaaggtccggagggttgaattgaagctcaccaagcgtcaacttgcgggtaagattaatgtttcggacctcacaatttacctgtgggaaaagaaccgggttgatccgtctttggcccaggttctgaggattattgagttcttgggccgtgatccgttcgagaaaaaggctgagaatctgggagatcggattcgcgaatataggcgggttcatgggctgacgcagaagatgctggcagagcaactggcagtcgatgagacgacattagcaacctgggagcaggggcggcataagccctcaaaaagacttcaagaatccattataaatttgttttcatctccgattaatggaccaaaggacatccaaaaggacaggcctttctggatatatggccctcaagcatttttgccacgcataatacatatctttattaacgattttagttaaggaaacatcatttggattaataatcattttcaattcagaatcggatatcttatttgatgtggattcacattgctttttcactttctttctattttctaaatatcgttcctcaacattttgcttgaattgttctggaaagcactctttaatcttcatcattaatattgaatcaagaggaacatgaataaaagcccgtattgtgttcgatagctccattcgtttagaccaatcgatgtatactttataaaacacgtttaatggcttttgcccatatgaaatcgtatctcctcttgaagtctttatctcttaaaggattctgccaatgcaacaactctggtgatgcaaatattagatctccaaggacaaggtcaccggggagacaagggcggagagggtgagggcacaatagggggataatatggaagataatttttattcgcaaccatggggccttgtctctagaaaatcgataagaatttaggacaccaggtgttttgtttatgcaagaccgaaagcatgcgttcgatagccagagtttgaatatccgcgtttcacgtcttcaagagcatcaaatttgcttttcccgctgtaggagagtatcctgcgagttttgtgttactatgactgaattggaaaggtctcgaaacagcatgctgaacgggctgaaaaaactaagaataggtgacttgaccgctaagcttcccattatccagggcggcatgggtgttggaatttccatgtcgggattggcgtcagcggtggccgaggaggggggggtcggtgtcattgctacggcaggcatcggcatgctcgaatcagatggattctcgaatttcctggaggcaagcattcgaggcctcaggcgcgaaatccgcaaaacaagggaaaagaccaaagggatcgtgggcgttaacatcatggttgccctatccaacttcggcgatatggtgcgcacggccgtcgaggagaaagccgatatcattttttcgggtgcgggtctgccgcttcgtctccctgaattcctaaaagagaaaggaagaacgaagctcatcccgattgtttcttcggccaaggcggccaatctcctgatccggaaatggctaggaaaatatgattatcttccggacgcttttgtcgtcgaaggaccgctggctggcggccatttgggtttcaagccggagcaaatcgaagacgcgaattattccctggaccggctggttccggaagtagtggcggaagttcgcccctacgaggaaaagcatcaaaaagaaatccctgtgatcgcggccggcggcatctacacgggcgaggacatccggagaattatggatcagggcgcttccggcgttcagctggctacccgtttcgtctgtacggacgaatgcgatgccgcgccggaattcaagaatgcgttcctgaaatcacgcaaagaagatctggttatcatcaaaagtcccgtcggcatgcccggacgagccatccggaatcaatatatcgacgatgtcaatgccggaaagaaaaaacccttccgctgtccccttcattgcatcgtcacctgtgaacgacagtccagtccctactgcatcgccctggccctcaccaacgccttgaaaggccgtctggaccgtggattcgctttcgctggcgccaatgcctaccgtacggatcggatcatttccgtcaaggcgctcctggccgaattgctctcggaattcaggtcatcctataaataaggatgccgcagacgaaatgcggtggcgatgatagtgttttctcctccaaaccatccctccccacaaatcccaacctgaacgaacccaaattgtgctaatttgagattcgattcaatcggctgctgaaggagaagccggttgtgagtttttccccctcttcaaaaagtctctttagaggtggtacaatgagcgagcgcgggtcactgtgatgaatcaagtattattcctctccagcgacaattaaaattcccggattggggcgggcgcttttgagctaaaaaagatgttttcccgaaccgatggagggaagcgacttcaccagaggctccaggaggggcgatctcgggaagaccgatgatcatttcgcgtcctcttcggcttttttcttcgcggtcgacatccgatagcttccgacattcagttcgaggatcacgctgtggtgaacgagacgatcgatggccgccgccgtcaccatcggatccttgaagatcgtttcccacttggaaaacggaagattcgaggtgatcagaacgctgccccgttcgtaccgttcggccaacaacgtgaagaggacatccatttcgtcctgtccctgatggacatagccgatatcgtcgataatcagagcttcgtatttagctagtttcttcagcatccgcgggagctgaagattccgcttggccaggagaagctcctggaccagaaggctgcacattgtgaagtaaacgcagcggccctgacggaccagggcgtttcccagggcgcagatcagatgggttttgccggaaccgggatttccgaaggccaggatgttctcccgtcgttgaaggaagcccccgtccagcagcgctttgacttgatggacggctttagccggaagtcgtttcatctcgaaccgctccagggttttatccggagcaagtcgggactccctcatcaatcgctccacccggtgattccaccggacgtccctctcccgttccagaagagccaggagatatcgatccagcgacagcccctcttgcgtcgcttttgcggcgatctcctcatatccgtcccggattccggacagttgaagatatcgaaagcacttctggagccgggccatgacgtcactcgaggcggccatggccaacctccagccatccccccagcaactcatcatagctttgaagagggatttcggcgacttcgacggccatcggtgacgaaaccggtgcggccgatcggagcagcattctgacggctccggccgatatttccgcctccccgtcgatgatggtccgaagcgcgtcgtccaccttggtttccgattccctcgccgccagatacaggatttccaggtactccttggccgcccgacccggtttttcttgggagagcagatcccaggccattcggaatcgcgtcgttggatacagatcctcccggtagcggtagtgttcgaaggccccgggttttcttaccaaccagtcgatgatgtgccggtaatcgatgcgatgacgatgttctccacgaagcctcgggatccgctccacaagcttctgcccgtagaggacatccagatgctccccatagagccgaaccgtcacttcctccccgatcaggcggctggcaaccgaatacgtgttcctcttgacccggatcgtcgcaaaaggactgaccgtgagccgatacacgcgaaaatcgtccaggcggagggcgggaagctgccgaagaaccgcctgttcctcttcgaaccgctgccgccggccccgattggcccgggcaaagatcgtccggaggaacgcctcatattcctcccgcgactgaaaatcccggcttccccgcagacgcagcgcttggtccactaatcgtttcaaccgatagtggccttgctcgacatcgccgttttcgttggccgccgccacctggattttgactccctccaggccataatggcctaacagcgcccgataccgcacggtgaactcttccggccggcattcctggtggattgctgccgacagctgatccgtccggattcttttcggtaccccgcccaactcccagagcgcattctgaagccccaagctcagactttcgaagctttccgaaaaacagatcgtcgccctctcccagttgctgtacgtcagtacaaaatggtggagaagatgatcgaaccgctgccgttggatcgtcacccccaggctgttcatgcaggtgaagtccattcccgccaggtcccccggcacatggatctgcggaaagaacgtttccttggccggcccttccagagcccgccaacgtttgatccgccgctgcagcgtccgcagttgcccgtcggcatagcggcccggatagctccgctggagctcttcgaagatcgtcttggcctccaacccctcatcgattccctgtcaagggtcatctaattttaaccctttccggtcattgaaaatttaccccctggctcatgcttaagactcttcgacctcgggctctcggatgattccggccttgaccttctccctcagacggtaggagttgcctttgatgttgatggtggtggagtggtgcaggatcctgtccaggatggccgtggcgatcacggggtcgccgaagatctcgttccattgcgagaagctccggttcgaggtcaggatcagggcgcccttttcgtacctcctcgagacaagctggaagaacagatgcgcgccgtgccggtcgatcgggatgtagccgatctcgtcgacgatgaggagcttcggctggcagtaaaacttcagccgctcctcgatccggttctcggagtaggccttggtgagcgaggcgatgagcggcatggcctgggtgaagtaggtgcggtagccttcggtgaccgccttgacgcccagggccaccgcgagatgggtcttcccgacgccgggagggccgaggaagacgacgttctcgccgttggggatgaaccggcactcggcgagttccttgatccgtttcttgtcgatcgaaggctggaaggcgaagtcgaacgactcgagcgtcttgacgtaggggaacttggctaaggccgtagacctccttccaggagtcgctcatagacggccaggtccctgacctcgacgtcgtcctgaggtgcctcggccggcttcgccgccttgatgaggccccagtagtgcgtccggtcgacggacgagcggtgggtgccctcgagccgcggatggcaggagacgagctcccccgagtgatagatcttgatcatctcgccatcggtcaggacttcgacgcgcttgccggccaggcggcaagggaccgagtagcggttcgtttggtagtccttgggcacgtatctgagcgagcgttcctcgatcacataggctcgccggcccttcacggcgagcagcaggtccttttcctcgaggaacatctccgagggcttgcgatgggtcgtcccgtggatgcgctcgtcggccatcttgacgatccactcgagaagcttcgagttgagatcgtcgaggctcgtaaactccttcctcctgaggaagcgcttgacgtacttgacgcccgattccaccttgcccttggtctggccgatggggcgtcgggcggaagccgtaatgccggctgaagtcccagaagaccgggttccactcgaagcgcgacccttcgaagtcgctagtgtacagtgatggttgcaatttggaataggagggaggccatcgtaaactctcttgatcggcaaatctcgagaggaggatttttactacgatggcccaagtccattataaggcactttttcagaaggcgctattacagttcatcactgagccggatcccttcctggccatgctccagtgggtcatgaccgaaatgatgcgaatcgaggcggaagctaaggtcggcgcggccaaggggaagcactcggaaaaacgaacgacctatttttccggggctcggatccggagagtcgatacccgcctgggaacggtctatcttctggtccccaaggttcgaaaaggcggctacatcccgtttttcatctcggaaagacgtcgatccgaacaggccttgatcgccgttgttcaggaagcgttcatcaatggcgtctcgacccggaaaatcgagcggctggcccaagcgatgggcatcgagaacatctcggccgcccaagtctccgaattcaaccgggaactggacgcccaggtggaatcgtttcgctcccggcctttggagcaagagtacgcggtcatctggatcgatgctctctaccagaaggtccgcgtcgagggccgggttgtttccgtggccgtgatgatcgcctgcggcgtcaatcaggcgggaaatcgtgaaatcctggccgtggagccgatgttcgacgaatcggaggacagctggcgctcgtttttccaaaatctcaagaaacggggaatgaaacggacggccctggtggtctccgatgctcattccggcctccaagctgccacgaaaaaggaatggctcggggcctcctggcaacgctgcaaggtccacttcatgcggaacatcctggcccgggtcccccaccgggaaaaaggtcgttttgcggctcatctgaagcagatctggttggagccggataaaaaaagcgcttgtcgggcggcagcggctctgatcgacgattacgaaaagcgcttccccgaggcgatccggtgtctggaagaagggttggacgactcgctctcgttttacgacttcccggagatcgataagaaacggatctcgtcgaccaacggccaggaacgtctaaaccgggagatccgccggcgcagccgggtcgtcggcgtttttccgtccgttgaatcttacgtccggctgacgatctgttacctggtcgaatacgcggaggactggagcggggagcgaagctacatccgggaggacaagatcatcggatccttggaaaagttccatgagctgacaagtcaaatcgcatgctgaagagagttatgatggctgccaaattgcaaactcatgttgacatggcccagtttatagcggaaatacaactaccttactacgatacaacaaacaagaatgcccttaagcatctctccccaactaagattatcgaaatgctagaaacaagatactatccaaagatttgacccgcaccccgtttcttgtccattttgtcagcaacttttcggatagatttcaatgactttccactgatttatttgccagagactttagtttgttatagtgttctttgtcagcaattttaataaattccatcgtttggtcagcaattttttttgcctcaaacatcgctgctgttataggtctcgaaaaatcttgtccgtgagaatattcatgaacgaatttaattataaattctccaacacttcgttcgaatgggttatcgtcttttataaaatgggaccatacgatattagtaaaatcttccgtggttctgcacgcccacttgaatcctgcaaagtattccaatgttttcctagcaatatttgcaacaagcggctcatcaatgatctgatgatcgtttttatatagatataatcggctaaaaaggtattgatattcgcttttatattctttaagcagcaatggcaaatcttcaaccgttagtttgtatatattttggtctcggtgaatgctcattagatagagactagacttttcattgggcctattcatccaatccctaaccaaattaaaaaactcataattatgggtaaatacgatcaactgtttggcatttttcagcttatccttaaataggccaaaggtttggaataaatgcatcgcgtcctggctgtcgattggatcatctataacaattgtacaggccgttttatcacatccttcttcttcgagttttacaaaaaagtaaatcagggcaagaatgcttttttcaccttcgctgagatgttttgccttttttctccgtctctttaaaacatacccatttgcgctatctgttgattctgcaacttcaagatatatttgtccttccccgaaatattcttttgcaattgtatttatcttatctaccgctaaagcggtgttccgcattgccgatcgcttgttatttgcatccaacgatagtttgtcacaattatcccttagttgttttatgtttgcttcaagctctaaatactctttcttttttgtaaaataatcgccttgcttcaaattcactgcaattgtatgcagctcgatctttttagccgcaatcattatttcatcaatatttttatcgactcgcttgttatgatttgctattagcttatttatttcgtcggcacattcgttaaaaatattaacatcttcatcaggatagtttattattatgctcgaagagtcattaatttgtatggaatcctttttctttttaagagcggcaatgatttcagaaatagatttttttattgactcagcgcactgatgtaaagcacttctcgattttaaaaacccctttgaaatatccgggaaaaagctgcgggaatcgatatcgatagatcgattttcgttttcatatttattcagacattcgatattatcgtcaattttctttctgaattccaatagctccttagtgaagtatcttccgagtttctccagcatgcccttgggaattggattattacagaattggcatactgataaacttcgctctttatgaatacgatatcccgcttcgacccaatctcttaatcctttgtcttcgctaagttcttcgatatcttcgatttctaaatcaagccccaataaagcattagtgtctttatataaagattttaagccttctattttagaaataacgtttggaatagctgctttttcatttttaataatttctttgttttcagctaaaatattctcatcggtaatgatgagtgtttcaagattattttcacctatcgtgccttgggctaatagatcgtctactttgttctttctataacttcttccgtaataagcatcgtttgcgagcggagtattcccgaattgtttaggtacttcccctgctgcagtcgttagaatcttttcgtacgttggagatcttggcagcttcgccgtctgcttattcaattcttcctgcgatcttttccttttgtcttcgatttcgtctatctctttttgcagttctaggttttcttttccgataattataatccgttttgcttttgaatcgctgaattgaaggttttctttaacaaactcttcgttgaacacccttacatttaagccatgcgtcttcaagtcctgggttttaatcaatccagcatcagaatggatagtgaaatccaatgaattgtattccggtaaatcaataatttttttttcaaggaaactcaaaatccgagataaagttgtcttcccagagccattccagccgtaaataagattatatttctgaaaatcaagggcactccattgaaataaatcaaatgcatctatattttttatatctttgatttttagaatcataatttccaccccattttgccgatacaggccagcgtttatatggacggtctaatgataaatataatcatttaagaagtaaagaaagacaccaagaattaaaacgtgatcagtattggtcgagtgaacatatgctcgcattttctgggtggtgatctcgaaaccctctatcaatcttgattacatgaatcttaccgcatccagtccatcatccggtactggatcgcctcggagatgtggctgggccggatctcctcctcccccgccagatccgcgatcgtccggctgtcatcggtcatgcaatattaacccccggcggtcattgaaaaattacccccttgcttgaaaggggttaacaggtgaatcaacagcagatatgcttcctcccggccgtccaaccgggaggaaacgacatggtcaaagcggatctgtggcacgaaatccacagccggttcagactcaaaggaaacgaagaaatccattgccagagccatcgggatcagcgttcaaacggtccggaagatcctccgtcagaaacaaccggagcgctatagccgaaagaagcaggaaagcgagctcctgggcccgtttcaagaatacattctccggcggctggcggcggtgggctactgtgcccaggcgatcttcgaagaaatccggctccgtggttatcaaggcagctacccgacggtcaaacgattcgtcggtccgttgcggcaagaagcggaaatcgaggcgacgatccggtttgaaacgccgccggggcgccaaggccaggccgattggggccaatgctggacgatcatcgacggaaaacgcgtcaaggtgcatctgttcgtcctaacgctgggctacagccggaggatgtatgccgtggccaccgttgacgagaagatgccggccttcctgcgttcccatgaagaaggcttcgccttcctgggcggcgttccccgcgagatcgtctacgataatctcaagtcggtggtgttgggtcgtgattttgagggctcgcgcttcgaatggaatccgatcttttgggacttcagccgatactatggcttccggccggcgccgcatcgtccttatcagccccagaccaagggcaaggtcgaatcgggggtcaagcatgtcaaacgcttcctccggggaaaggagtttacaagcctggacgacctcaacgcccagctcaccgactggatcgtcaacgttgccgaccagcgcgtccacggcacgacccatcggcagccggcggagatgttcctcgaggaaaaggaccttctcctgccggtggccagtcatcgggcctacgtgatcgaggagcggtcgctgcgctacgttcccaaagactgcctggtggcctttcaggccaaccgctactccgtgccttatcgcctggccggcaagcgcgtggaagtcctgaccgacggcgaaatgatcaaaatctaccatgccggggaactcgtttcctgccatgcgcgtatcgagggatcccatcgttcgtcggtccagatgtcgcattatgtgggcttaatcaaggcggccaagccggccgaggcgccccaggacgacgtcgaggtcagggacttggccgtctatgagcgactcttggaaggaggtctcctgtgagcctctcccatatccaggacaaccttcgccacctccggctctaccgcaatccacgatcgtctcgaggcggctctcgaagaagccgccaagaacaacgtctcctacaccgacttcctggacgagatcctgtcccaggaagtcgcctccaagcaggaaaagaacatctccgtccgaacctcgatggccaagttcccctatgtcaagaccctggaaacgttcgacttcgcctttcagccttcgatcgacaagaagcgaatcaaggagctggccgagtgtcggttcgtccctaacggcgaaaacgtcgtcctcctcggccctcccggcgtaggcaagacccatctggccgtggccctgggcgtgaaagccgtcacggaaggctaccggacttacttcacccaggccatgcccttgatcgcttctctgaccaaggcttatgccgaaaaccggatcgaggagcggttgaagttttactgccagccaaaactcctgattatcgacgagatcggctacatcccgatcgatcgccacggcgcgcatctgttttttcaacttatctcgaggaggtacgaaaagggggcgctgatcctgacgtccaaccgaagcttctcgcaatggaacgaaatcttcggggatcccgttatcgccacggctatcctggatcggatcctgcaccactcagccacgatcaacattaaaggcaactcctatcgcctcagggagaaggtcaaggctgggctcatcaaggagcctgacgtcgaagagtcttaagcatgagccagggggtaaattttcaatgaccggaaagggttaaaattagatgacccttgacaatcggaagcgatatcccgcattccgggcaagaaaaacgcaatccttctccgtgaaccgcccagacgtcgacccgttcttccttcacgttcaaagaaatccgatccacccgccagggatcttcaatccccaatacataccgataaaactccgtatcttgcatggctccaatctccttgaagccattttatctcagcccgttacccattaaaatgtcggatgcgcctttattattttcatcaacgttgtatcatcgaccgaatattttttagctctatcgcggagggcatcgacatctaaatagacattactgttcagtatttcaataactttcgagtcgatttcataaacgtttccatttaacagatcgtatacaagcccggacattccattaacgcaagttcggataaatgggtgaaatccgaaggctttcatgatattttatatcgatataactgaaccgattgttgatcttcatcatcaacttcaccgtacaaataatagtatccgtctccccatcgaaggttgagttccggtgccgacggaaaaggtagccacattatgccttcaaaatcgagcgagggaagtcgatatacgagagtttcatttcgtttcctgtttccatcacgatttccggtaatgattaaaagccaatctccgattaccttaaggtccattaaaggaggggctttggccggtttgaaataatcatatgtaagttgactttttaatacttggggtaattcatcaaaataccattggaaataacgtttgaattcttcattattaatattcagaggaccagtgatgtcgagtactattttgtctttctctccattgaagcggactcgatcgatttcaggccgttcaatatccggaatagcatagattgtctcgtgattccaatcaaccgagaaggattgcatccatctcgggcgatcataataatccaccctgataactttagaatgattatcgcgaacgagccattcgggaactccttttttgagcgacgccataatccgataatttgtaaattcttcattatgaatcgcaaaataatatgtttgatcagccatatagtttgtcgattcaatagacacaattgtccacccattattcgtttcaaatcgcgaccatccaaacttatactttccttcatatataggaattcgattggtcagcctaaattttgaatcaacctttagacttaaaagatttatctccttataaaaatcacggttatcgatgaacatcactttttccccatcatgggatagcctcacgctttgaggatcaacgctgagaatgtctgtcgaaccttgcccattttttacaatgcctctacggatttcgtttccagccatatcgaaaataataagattgtattccttttcatccttctcagaaacctgttgagtgagatatccttcgggaatcggaatccaccatcggcaatatttcattgtcttttcaaaggatttttcaaacgaaagagcgatgaactgtttctctgacccaagaggtgccggaatttttcttatttttgaacaggccgataataaaagcaggctaatgataatcactccaccatattttctaagcatcgcccctccattattttatattcaatatactctggaaatcgcttattaatatttgttcgtaattgtcgacatatattttctaagaatatttccccattatagccggacgtcccgacacacgcattgcattgcgattgtgcaatacaatctccgcattctgatgtcttttcaaatccctcttttttgatcttatatattttattaatatcaatacccgtatatacatcgccaattgcaaaactctttccgactcgctcacagctgtgaatatctccattgacactaaactgaagcttttcagcgcccaatgtacagaaacttgcatagttcgccccgtgacgatcagaaagagtgttgatagatattcgataatattcggataaaatcgccttttcaattttatttaatgaatgaccatatttaacagaagccattattttagaatataccaattcttcgtttattccgattgatggaaaatgcaaatatgaaaaatatgttattacttctcctaatgccattttgaaggacgattcaaagagatcattcgaaaaatattctaatatctgaagtaaatcggtatcttttgcatagacgatagaaaaagaaatatttgaagaatagtactctggatatttatttttaatattccttattattttctctaatttatcaaatgtatctttgcctttgtttttttcatggatcgattttgggtcatcgagactgattagaactcgaaaattattttttacaagaaacaaaatgatttcttcgttcaataaaagaccatttgttgttacactataatgaaaaccaaatggatactccttttggttttgatggatacaatttttcgaataatctaccattcgcgcgataagatcgaaattcaacagaggctccccactataaaaaccgatcgaaaacgaatatggggatacctgaaatctctgatttgttataatccaattaacaaagaaatcaaatgcttttttggctatatcccaattcatcattttgacctgcccccgatcattgtaccacctgtagagtgaggaattgaggctcgaaagcttccggagctggcggccgatatcccagcgaactgtgcgggcgatggcggttgaaatcgtttcgccaagcttcgatcaccgtccgggcctcctgaagagtatcgaagagttccccgttgagcaattcatcccgaagcttcccattgaacgattccacatagccgttttcccatgggctacccggttcgatgaagatcgtcttcactccaagacgattgagccattcccgaatttttttagccgtaaattccggcccgttgtcggatcgaatgtaatccggcacacctttggttaaaaagagttcatatagccggtccagaacattttgggaattcaaccgccgggcgacatccaaagccagacattcccggctgaattcatccaaaatcgtcaacatccggatgggtcggccatcccgcgttcggtcttggacaaaatcgtagctccaaacatgtaatcggcatgaaaagtgtaccacctgggatctgaaatggtggtatcgtcttctcgaacagaggaggtgataccggatgattaccaaggaggtatacatggacattaaggcgatgcaaaggaacgggaaaagcatccgggcgatcgccaaggagctgggcctgcatcgggccacggttaagaagcacttggtcgagacggattttccccggtatcggaaaatcgaacggaacatttcgatcctgacaccctatcaacagatgatccgcgacttcctggaggaagacgattatcaggcgacttggatatgggaaaagttgaagaatcatggatatcgcgggggctatgatacggtgagacgcttcgtcggcccgatcaaagcgcaaaagaaccgcctggccttcgcccggttcgagaccgagcccggtcaccaagcccagtgcgattggggcgattttcaagtcgagggatccgagacggtctttgccttcaagcttgttcttggcttcagtcgggctgattataccgagttcgtcgacaaaaggacgatggaaagcttcctggacgctcacatccgggcgttcaaatatctgggggggtgccggccgagatcctctacgacaatatgaaaaacgtcgtcatcgggcgggacgcgttcggaaaacccgtttttaacatcgagttcctctattttgcccggcattacggcttccagccgaggctctgtccggtttatagcccatggacgaagggcaaagtcgagcgaccgattgattatctgcgggaacggttctggcggggatatctcttcgaatcgattggaaaaaccaacgaggacgtcctggtctggctcgacgggacggccaaccgccgaatccacggaactcatcatcagccgatcgacgttctgtggaaagagaagattccgcggcttggaccgctgccggcttccgactacgacaccttgctaaagacattccggaaagtctaccgcgaccgtcagatctccttcaacgccaaccgctacgtcgttcctcaccgggccgttggtcaaaaagtcatgctgaaagtgaaaaatcaacagatccggatcttcctcgatcaggatcttctggcttcttatgaagagcccgtgacgaagcggaacgtcccgggagatccgcggttttacgaggagctccggcgggatcgggagcagctgagacgagaatacggttgctccaagggcaaggcgacccggggtcttctcaacggcagcctctggcccgaggtccatcatcgcccgctctccgaatatgaacaatatgcccagggaggcgtcgcatggaacaattaacctgcgaacgtctccaggacaacctccagcggctgaaactggcccgggcggcggaagtgcttgaagccgttgccggccgggctggggaaacccaagcctcctacttcgctttcctggaccatctccttgaggaagaagtggcggctcgggaaaaacggcgcctccagaccgccctcaagatcgccggcctgccgtttgccaagaccatcgaggaatatgacttcagcttccacccgcatctggataaaaaagcggtcatggagcttttcgatctgaccttccttccgaagcatgaaaacgtcgttttcctgggtcctcccggcatcggcaaaacccacttggccgtcgctctggccatcaaggcctgtagtcaaggcttcaaggtttacttcacgaccatgtcgacgctgatcggcaagctcaaggaaccccagagcaaggggaaagccttcctctcggccatcctcgatcgtcttctccatcactcccgagtgatcaacatcaaaggccacagctaccggctcaaagatcacggcttccgacagccgtcatatccaaaagaaggaggcgaaaccgtgtctgccacgccagcctgatcgcaccatgggggtggtacacttttcgtgctgattactggtacattttttcatgcttattgacagcttcttcaataataccggtccatcgcccggtattggatagcctcggccagatgagcggcggagatctcctcggctcccgccagatcggcgatcgtccgggcgaccttgagcgaccggtcataagcccgggccgagaagccgagccgggagaccgcttcctccaggagcttttccgcctccggcccgatccggcagaactcccgaatctcccggacccccatctggacattggcgaatatccccttgcccgaaaaccgcgccctctgccgctcccgggcggccgtcacccgggccttgatcgcggttgaggactccgcctccgctttcgacttgaaatcggcgaatttcaaggccggcacttccacttggatatcgatccggtcgagcagcggccccgagatcttcgcgtaatatttcgaccgctgggattccgtgcattccccgctccctccgctcaaccccttgaatacgtcctcacagggattcatcgccgcgacgaacatgaaggcggccgggaagaccgcccggtggccggaccggacgacggtcaccgtcccgtcctccagcggctggcggagatcctcgaggaccttgcgcttgaattcgggcagctcgtcgagaaacagcacgcccaagtgggccaggctgacctcccccggccggggcacgagcccgccgccgatcagtccggcgtcggaaacggtgtggtgcggggcccggaagggtctgaggccgacggccccttttccttttaaatacccggccgcgctgtagacctgggtggtttggatgatctcctcaaacgtcatgtccgggaggatagagggcaggcggcgggcgatcatcgtcttgcccgagccgggcggcccgataaggaggacgttgtgcccgccggccgcggccacctccagggcccgcttgacatggtgctggcccttgacctcccggaaatccggtcccggcggcggcggctcgatcagctcggagagggcgaagcgggcgggccggaaccggccgggatcatgaaggaaggaaacgacttgagacaggtcggacacgccgaagacgtcgagtccttcgagaagggcggcctccttctcgttgtccttgggaacgacgaggcccttgaattttctctcccgggccaacaaggcggccgacagcacgcccttgaccggcttgatccgcccgtccaaggcgagctcgcccaagaaacagtaatcgcgaagcggctcggccgggacgaggtccaaaaagacgagatgagccagggcgatggccaggtcgaaagacggcccctccttccggcggtcggccggggcaaggttgatcgtgaccttgtgcggcttgaaatcgtagccgcagttgcggagggcgcccttgacccgctccttgctttcccggacggaggcgtcgggcaggccgacgatgatgaaatcgggcaaaccggggccgatgtcgacctcgacctcgacgacataggcctcgatcccctggagggcggagctggacgttttgatgagcatggcgccatgggaagagacggcgccggagggagatttatatcagatcgagctcgtctttctggccgatccgggaatattccgcgccctcgaacccgaaaatcttctcccggacccggggaacggtcatccgggcgatttccttgagcgtctcgaagacgccgagtccggtgatcgcggccgcctcgatgaacggcgcccccttgggattgaggaggttgttgagcgtctcgaccgggatcaggtcggagaggtcgcgcttgttgtattggaagaccagggggaaggcggccagctcggtgtgctgctccttgaaattccggcggaggctttccaggctttccatgttggcgtcgaggagcgggatctgggagtcggccacgaagaccaggccgtccgtccccacgaggacgtttttccgcgaggcctcgtagtaaacctgtccgggcacggtcatcagctggaaagtggccttgaaattcccgatatacccggcccggaccggcagtagatcaaaaaagaaagtccgctcggtctcggtctccaggcagatcagctcgcttcgcgaggaccgatcgatattggcttggatgtagcggagattggtcgtttttcccgacaaacccgtcccgtagtaaacgatcttgatcgtcagttggtttgtcgtgtagttgatgaatgccatttcttcgggcgctcttcggactacaacacccccaagagtatatcatatttttccatgacacacgcccaagtatattgcttttgaacgtaccggaggccgttttcacccaaagcggcccggaggcgctccccgccccccgccagcaggcccagggcggccgcgaacgtggacgcgtcggagaaaaacagcccgccgttgctgtccaggcagtgctgtttgagaggatcggatccttcctggacgaggaccggcgtccggacggccagggactcgagaacagccatgcagaggctttcgaaatgcgagggatggacggtcgccagggccccggccatggccgcgtttttttcctcgggggagacgaatcccaggtagcggatcctcggatcgggaggaagctccatgagctgcttgccgatcaggacgaggttcaggccgggaacccgccgccgcgcccgctggaaatattcaaacagctcggcgcagcccttgcccggctcgatccggccggcgtagaggagatacggcgcgagggcttggtacttggggaggaattcccggtagccggccgggtcggggacgtccacccccacgccgacgatgtcctggaccttgccctcgaaggagaagcgggaggccagcatcgcccgctcggccgcggtgttgaagacgaatcccgccggccgggagaaaacctccttcatcaggtccagccggagggccggctcgtcgtgggccgtcgggaccaggagcgattttcccttgagcatccgcaggccccagaaggtgttgtagtagaggtaggtgaagaagatgaaccggtcgtggagggactcctcccgctcgagggcgaggatgagatcgaggctgaacggcccctgccgctccatccaccgcagctcgtcctcggcggtatggggattggcgaaaatccagtccgagtaggcgttgaacgaggcgatgtcccgcggccgctcgacccggtatcgcttgacgacgacgccgttgaggatgaattccccttccgggtactcgtttttccaggtgacataatccttggccgccgtggtgtagaccgtgcagtcgtggccccgccgggccagccgctcggccaccatccggcagtgaagctccgagccccccatcacttccttgccgtatcgctggacgacgaaggcgatcttcatttctttctcccgagccccgggatccgttcgcggaggaactcctcccgggggaaccgcttcagccggtcgagctcccggcgtccgctttcgatcagctggacccggagggctggatccttggccgcttggtgaaccgtttcggccgtccggtcgggccggaattcccggagcagcagccccgccccgccgagggtgtacggcacggccgcagccgccagggccacgaccggcaggtcgaaaatcatgctctcgacgagcggaaggcagaacccctcgtgctcgctcagggagaggaagacgtcggacgcccggtagagggcgtacatctcgtcgtccgggatatggccgaagaacaggacttcctcgggcttgagatagaactcgtcggccatccgggagacggccgcgaaataggccggaaacgtgttggtcttcccgacgaccatcagccggacgagcggcgagatgtatttcttgtagtagaacaccgtcttgacgaggtgttcgattcttttgttgggggcgatccggccgacaaaaaggatgttcgtccggtcgtcccggtagagatcgcggaggagggcgttttccgggcggtcgtacctcgcgaaatcgacgaacagcgggaagacatgggtgtcgcggaagcccagggcctccagctccagccggttgtactcggaatcggccaagctcacgtccacggccggggccagcgaggccagctcctcccgcccgagccgggcgacccgggcgaattccggattaacgccctcgaaaaacgaggccggggtgatgttatggtagatgagggccttgcgcgagggcaggccggccagggcggccgaaagcggcgagggcagggcgtaatggaggatggtcacgtccgaggcggacgggcgggggaacgattcgaagagccgggagtcgttttccaggccgcggtcgcggctcaggcagtagatctcgctttcgcagccctccgcccggaaaaaccggcgcagctcccaggcttcgtcgccgatcgcgtcgccgcgatggaaggcggggacgagctggtcgactctcatctcccggccgcctcggcgatctgggccaggaggacgcggctgacgttctcccggagatacggcttcagggctttcttctggccctcgacgattttgcggcggagctccggccggcgctcgatctcgtcgatcagcccggccgtccggagggggtccttccgccggaggacgacgccgccgccgttcatggtctcctcgaccgccccggcggcgaaagccacgaccgggatgccgaggtggaacgcttccaggaggggcacgccgaagccttcgtgctcgctcatgctcaggtaataatcggccagccggtaataagcgagcaattcggggaattccacgtggccggtcaagtggacgtcggcgatccggagcttggcgatcaggtcctggaggccggccaggtaacggtcctggccccggtagtccccggccaggatcagccgggcctccgggttgaaatgctttttataaaaggcgaaggccttgaccacgtcctcgaacttcttgttcggaatcacccggccgacgtagaggatcgtcgtcttcttcgtttcgtacagcccccggacgacgggatcgccgggcccgtcgaatttccggaaattcatcaggatcggcaggacgccggtcttcttgtaccccacggaggccagctcccggcggttgaaatcggagtcgcccagggccaggtcgaccttgtcgacgaacatgttgatttccagccggcccttgtagcattcccgggtcaggattcggtgggaatcgagaaagaacccggccggggtgatgttgtggtagatcatcatcttgcggtcggggatgcggagaaacatcttgctgacgggggagccgatcgagaaatggaagatgaccacgttctccggcttgctccagcggggatattcccggtagtcgcggacggccgcggccgagcgcggatcgaactgccggacgaatatctccgagccgaagccgtgctcccggagaacggactggatttccagcatctcgtcggaaatggcgtcgccgtacgtcagggacgtggcgaactggtgcacgtccatcagggctcctcctcgaggcggcggacggtttcgaggtatttctcctcgatgatgtcccacgtgtagtgagtttcgaaatagcggcggccgttttcccccagggtccggcggaggccggccgaggccaggagcagcttcagcgcctcccgaaactcggggtaatttccgtagaacaggccgccgtcggaccggcggcactggccctggaggacctcgcagcgggcgttggccaggaccgggcgcctgagagcccaggcctcgagggtgaccatggacaggctttcaaagaacgagggcatgatcagggcttccgccccggccagggcgtcgaacttgtcctgctcgggctgaaagccgagggcgaagatgtccggatggtccgggatgggcaggatcgagttgccgatcaagacaaggcccgcgtccgagccggtgtccttcttgaactggaggaaataatcaaacagctggggaaagcctttgttctgatcgatccgcccgaggtaaaggaggtacggtcgatcgatcccttgggttctccggaagcgctccggctcggcgccggccgggacttccgtcccgacgccgacgacgaggccggggacggaacggttcccggagacggcctggatcatctcccgctcttcctccgagttatagatgaaggcccggggcaggcggaaaagatccttgaagaacttcaagtcgatgaccgcgtcgtgctcggccgtgggcaccaggatcgccttccgggggaccgaccggatgccccagtaggaatgccagtagcggtagctgaagaagatgaaatagtcgtagtcggcctcgcgccggcggatgaaatccaggagatcgggggacgtcggcccctcctcctcgagccaggccagctcgtcccgctcggtgtgctcctcttccaggatgaagctctgcagccgcccgaaccgctcgggatcgcgcggccggggcacggaaaagcgccggacccggatcccgttgatcgtctcctccccctccgggtagtggtcggcccaggtgacgtagtcgtgagcccgggtggtcaggacctcgacgttccagtgccgggacatgtgctcggcgacccagcggcagtggagttcggccccgccgttgatctcgaggccgtagcgctgaacgacgaaggcgacgttcatgaacccagccgcttctccaggacccgttcccgacgggtctgggcctccaggtccttctccaggatccgggcccggctcttcagggtctcgaactcgatccggagcttggtcagctcgacgacgaggttgtgatccaaattgtgaagaagcttgatgtattccatgctccggtccaggtcgaccaagcggacgtcgagccagtcgcggaggcggtctaaatcggccgcggaatcgctgaagcgccgatcgatcttttccagcgcccgatccaggcgatcggagagctcatcctgccggcggctgatccggccgatctccgcccaagaagccaggatttcctcgtgcagcgggagccccaagagacggatgaccggggcgaacggccggatcgcccgggagagcttcagcttcacgatctctttcaaaccgggtttggacggcggcgggacggagggagccggggcgggcggctcgggagcggcgggaggggccgccggcggttctggcatcgcctcgagcggctcgacggggcgccgggcggcggcgcgcttgacctgggccatgatcgaggcgacatcgaaatgatcgtaatcgatctcgattccctcgatcgtttccttgccggcgggcttgacgtcgtccatcgcgttctcctcgaatccccccgtcagtccttcttcggatacaggtggtttttatagaccgcctggacatccaggatgtcgggcaagggacgcaggggcatctcctcgatttcccggacctcgcggtcggtcaggaggccttctttcttccgggcttcgatccgggcctcgatctcccgctcgattttcgcggtttcggccttgtcgaggcatttgatggtcagaaaatcggacattcctcggctcctcgcttatccgtcgggtgcttgcgattgtcccctcattctattcaaatccggaaggagaggcaacttgaaggttctccgcccgttggggcggaaaaagccttgggaaacgcctcgtccggacgatgtccgctccggctttcggcgtctccgccggcccccgcgggaaaagaggcaaattgaatctccccggccgatgtgttaattaaaagagcgaaacatcatgaaatccgagaccatccgctcccgcgtccgcgtcggcgtcatcggcggcgcccgggccaaggccggccccctggcccaagcccgcgacgtcggccggctgatcgccggccggggggcgatcctcgtttgcggcggactgtccggggtcatggaagcggccgcgcggggggcccgcgaagccggcggactgacggtcgggatcctgccgggaacccagccggccgaggccaacccccatatcgatttcgccttggcgacgggcctgggctacagccgcaacgccctggtggccatgaacgccgacgtcttaatcgccatcgacggcgaatacgggaccctgagcgagatcgcctacggccggatccacgggaaacccgtcatcggcctcggcagctgggagatcgagggcgtcgtcgcggcctcgtcgcccgaggaggccgtccgcctggccttcgaagcccttgccgcccggtcccgtccatgaccaattacaaaatcatcctgtgctacgacggaacggattatctcggctggcagcgccagcccaaaggccggacgatccagggcgaggtcgaggaggcgctcgcccgcctggccggaacgagggtgaacatcatcggggccggacggacggacgcgggcgtccatgccctcggccaggcggcctcgttcaaggccgatctcaagctcgacgacgcggcgctgttcaaagccctcaacgccgttctcccccccgacatcaggatcctctcgctggagcgggttccggccggcttccacgcccggcgcgacgcccggagcaaaacgtaccagtaccggatcgtcacggccaaggcgatcagcccgtttctcctccgctacgcccttcattggccgcatccgctcaacgtcgcgaggatgaaggccgcggccgccctgtttgcccgggaggctgatttctccggtttttcctccaaccgggagctctatccggtccgccgcgtcgtccgctcggaactccgcaaacggggcgaggagctgctcttcacgatcgaggcgaacgggttcctccgctacatgatccggacgatcgtcgggacgatgcttgaagccgggcgcggccgggtggaagccggcgacatcgaaaacgtcttccggacgaaagcgcggaccctggccaaccccaccgccccggccaagggtctctgcctgatgcaggttttttactaagggccggccgcgaggaaagcgccgtcatcgcatgagtaaagccgatctccaagccgaacaaagcggcggattcgaaaaccgcccctccggacagggacggcggcggccgtctttccgccgtcttccccgcaacgtctgggccgtgggcttcaccagcttcttcatggatgtttcgagcgaaatggtcctcaacatcgtgcccctcttcctggccaacgtcctgggcgtgaagacggccgtcatcgggctgatcgaggggatcgccgaagccacggccagcctcctcaagctgttttccggatggctgtcggacaagctgggggcccgcaaggggctggcggttctcgggtacggcctgtcggccgtcgccaagccctttttctatttcgcccgcggctggggcttggtcgcgggagtccgctgggccgaccgggcgggaaaggggattcgggcggcgccccgcgacgcgctggtggcggactcggtgaccccggaaatccggggattcgccttcggcttccaccgggccatggacaccgccggggccttgatcgggatcctcatcgccctcctggtcgtcggactcacccagagaaactccctgaccttagcccggtccacgttccagtccatcgttcttctgagcttgattccggcgttcctggcggtgctgtccctggccgtcggagcgaaggacgtggccgccagggaccgccggacggttccggcgatctccctgcgccgcatggggaagccgttttccatctacctggcgatcatcagccttttcaccctggggaattcctccgatgcgttcctggttctccgggctcagaatctgggcatgtcggtgaccggcatcctgatcatcctggcgatattcaacctggtttacgccctggtctccgcgcccgcggggattttctccgaccgcgtcggccggcggcggttgatcatcggcggctggctggtctatgcggccgtctatttcggcttcgccctcgcccggagagcctggctgatctggcttctctacgccgcgtacggattgtattacggcctggcctacgggaccgccacggccatggtcgccgacttggtcccggttgatctccgcggcacggccttcgggacgtatcacgccttgacgggcctgctggcgtttccctcctccttgatcgccggcatcctttggcagggcgtcggccggtggaagggattcggggcgccggcgcccttctatttcggcggcgcgctggccctcctggccgcgttcctcatggccgtctggatgcccaagaccccggcgagcctcttcacgagattaaacggcggctttgatcgcagccgcccggagccatgccggggccgggacggctgcgccggcggcgagggttcgcgctcgcgggctctcatctcaaaaaaccggggcgcattcgcggagcggtgaccggccgacggccggggaatcggttttctagggcatgaccggcccgccggcgccgaacatcaagctcatgaccaccgcatcctcgacgggattcgtgtaatattcctttcggaggccgatgggcatgaagccgagcttgtcgtaaagggcccgggcgccggtattgccggcccggacttcgagagtgacgaactgaattccatcgtttttcagggcgtcgagaaccttgcggaggatgttttcggcgatccggcgcctccggtaatccggatgaacggcgatgttgttgatctgggcctcgtcgcggatgacccagtagatgatgtacccggcgatccggtccgcttcctcgtccacggcgaccacgggatgggacaggccgagattctggatttccccctcgaacgtcgcgagcggccaaggattggggaacgaccggcgttcgatcgccagaacctcgggcaagtcgcggcgcgtcatccggcgcaagcggatgttcctcgcgccggcgaaaaccgccatcagcgcccttcctcggcctgcgaccggcgcaggtacagcggctcgagatcgtccgggccgatgccttttcccgcggcgatgatttcagccccgaggagcccgacttcgggagcgatgaaccgcgtccggggcgaaagaacggcccgctttttctccgccccgctcatggccgcctccaggatcgggaatccgccgccgatgaagaggattttccgcccgcggggaagccgcttcaggaacgcctccggggcgtaggcgccctccggaacgagggctttcattttcgctttttcacaaaggtacagggccgcgtagacctcgcccttcttggcgtcatgaagagggcagacggccgggaggccgtcgccgcggagcttccaggccagggcccggagggaggaaaccggggcgatgggcttgcccgaggcgaaggcgaaggcctgaatcaggctgaggccgatgcggatgcccgtgaacgagcccggtcccggtgtgaccgcatagccgtccaagtcggccggcgtccaatggagggatttgagcaggacgtcgatggaagccggaagacgggccgaatgcgtcccgaaggaatcgaccccgatctcggcccggacccggccgtcctcgatgagagcggccgatccgcatcccgtggtcgtgtcgaccgccaggagccgcttcggcccgggcggttcgtttccgcgggattccggccgccggtttgcttggcttgccgtcatgagggcatcatacaacaccggaattccgagagacaagcttcgtccggccggggttgctatttttctttattcttttcataatgtctttatcaaaggaatcagcgagaaagggggacgtcatgagaaaaggttttttcaccgccgtcgtcgcgatcctgttgctggccgccggatcctgcggcgtcccgaaaccgaaactggtcgctcgagaggtctatactcatccagagatcaacttcggggattataaagatgtcgctgtctacgtcgacctcgcgaacctgccctgggaaaaccggaatccttttttcatttcagccatcgagaacgccctcgtcgagcggggtttccatatcctcggattcgagggattcgtcgatttcacccgccggcatcaaattcgggccgacgaggctatgagccctcgcgccttggatctgatcaagaaggagacgggcaaatcggccgtcgtccggttcacactgaacgttttcgttctccacgcgaaggaggccgatttccttcgaatcgtgacgccgggagtgccgggattcagatggggcggcgtaacgccgatcgatctcatgctccgcgaccgccacgaatggttgatcgatatctccctggccggcgagatgcatgacacggagaaagccttgaagatttggtcctgctcgatgtccgggaaccaaaccaagtatgaaggttttatcaaggatttcctctcgcaagcggcggggatttgcctggatacgattccctcccgctgacggcggattagacattctttttcccgatgaaaagagccatcgggcccgcggaaaacgaagtcaatcctttttcaggcggaacaagctcccggcttcgtagatctcccgctggacggcgctcatcggctcgagcgggaatgccccgtcccgggtgaggtcgcgcccccgcccggcggcgagatcgagctcgacctcgtctcccgaccgaatccggccctcggccgccgcccgctccaggccgtcgctccggaggacggggaatcccgtgttgacggcgttgcggaaatagatcgccgaatacgaaggggcggcgatcgccgccacgccgagggcgacgaagcaatccaccgcctgctggcgcgaggagccggccccgaaattccgcccggcgatgaggatatccccgggccgggctttttcggggaaatccttccagccctccaggttgcccaaagcgaacgcgcccatctgggaaatctcggtgatgtggagatgagcgttgtggaagatctggtcggtgtcgatgtcctcgatcagccggccgtcggccccggccagcacccagacgcggccgcgaagaacggtctctctcatgtcacagctccccgggcgcggcgatctcgcccttgacgcaggaggcggccaccgtctcgggcgaagccaggtagaccgggcccttcccctgcttgccggggaaattgcggttcccggtgctgatttcgacctcgccttttcccgtcagcccggcgtggccctcggcgcatcccccgcaccccgggttgagaacgatggccccgctgtcgaagaggattttcaggattccggtcgaaagcatctcctcgtacacccggcgggtggccgggacgattttaagcataacccccggccggactttccggccgcggaggacggcggccgccgcctccatgtcctcgatccgcccgttggtgcacgacccgataaagccggagtcgatccgcgcgtcgcggacctcggacacgggcttcaccgtgttgggcgaaggcggaagggcgacctggggctcgaggccgtcgacgtccacttcgatctcggcggcgtatcgggcgcccgggtcggcctcgggcgcggccgtcccgggtcccgggaaggcggccgcggttttcccggggcggccgacgggtcccgggacaaagccgatgatgccggccatctcggtgatcatgctgcagagggtgatgcggccggccaggtcgagtccggcggccgccggcccgtagaactcggccgagcggagggcgattttcgaggttccgagaatccggcaaagatggagggtcaagtccttggccgtcgcccgcggcgagggcatccccttgagaacgacccggacgctttccgggacttcgaaccacgtccgtcccgtccggaaggcgaaggtgatgtcgacgtcgcccatcccctggccgaaacagccgatcgccccgaggatgttcatgtggctgtccgtgcccacggcggtcccgccggggcgggccagcccttcctccatcaggacatgggagccgatgccccggtcgacgtcgtagaccgggatgccgcgcttgcgggcgaaatcgcggcaggcctgctggttgtcggcatacttcagggtgcaggccggggcacagagatcgaaggtgaaggcggttcgggccggatcgtcgagcggctcgtcgccgtattcgcgttcaaaatgcttgacgacgttgggcccgccgaaatcgcgggccgaccggacgtccaggtccatccagacgatccgcccggcggcggcttcgtcccgggaatgagcctggacgatcttttcgatgacggtcttggccacggcgcctccctttctccccttacagcttgtcggcgacggcccggcccatttccagcgatgtggacttgccgcccatgtcgtaggtccggacccggctttccttgatcacctcggccaccgccccgtccagggcttcggccttggccgtctcccccagccactccagcatcagctcggccgccaggaacgtggcgatcgggttgaccttgtacatcccggcgtatttgggggccgagccgtgagtcggctcgaacacggcgtacgagcttccgatgttgccgctgcaggcgaagcccagtccgccgacaagctgggcggccaggtcggagatgatgtcgccgaacaggttttcggccacgagaacctcgtagtcatagggattcttcaggagccacatgcacatggcgtcgacgttggcgtccttgaagacgatgtcgggatagtccttggccacctcgcgggccgtctcgagcatcaggccgccggtctcgcgcaggacgttgggcttttcaaccagggtcacggacttgcggtttttcgcccgggcgtagtcgaaagccgccttgacgatccgccgacagccgttctgcgtcatgattcgggtggacacggcgatctcgtcggccgggaccgcggcgaacggcttgaatttcgggtgagtcgccagggccgtccggacggcgtccggaaggggccggaactcgaccccggcgtacatgccctcggtgttctcccggaagatgaccaggtcgattttatccttgtaattaagcgggtttccggggtaggccttgcacggccggaggttggtgaacaagtcgaattcctggcgaaggcggacgatggggctgaaatacgacaagcccttgccccggagcgagggatcgagctcggcgtcggcgtcctttttcggcttggacgtgatggccccgaaaaggcaggcgtcggtttccttgagaagcttcttcgtccggtcggggagggcgtttccttcccggcgccagaattcccagccgatgtccccgtaaatgtattccgcgtcgacttcgagctttttcaaaatgggcatcgtcgcctcgatcacgtccttgcccaccccgtcgccggggagaatcgcgattcgatacttcgccatgggatactcctcacatggattgcgcgccggagggggcgcggagggcaattttaccacagaacgccgcccgcggcgaatgccgtattcccgcctgattttgggatattgtcgagggttgcgcgcggccggcgcggtctccttcgtcggcggcgaggacatcccgcggatcatctttttcgctcagggccggaggacgccctgggacggcttgccggacgcgtttcttgatcttgatgtccccccggaagatgatgtatctttctttccgctcttcccttgggcatcgcggcgtcgtcgatccctgaaagaaggaggggaaaagcgtgttacaaccgtcagatcgaacatgatcccgctcaaagacgataatccggtccggatcacgccgctggcgacaggagcgctgattacggccaatgtgctggtgtttttctatcaattatcgctcgggccgcaagtgcagcgcctggtttaccagtacggcagcatccccgccgtgattctggggcacggaagcctgcccgcgggcttagacgccatcccccctgtgttcagcctgttcacgagcatgttcctgcacggaggctggctgcatctgatcggcaacatgctgtatctgtggattttcggcgacaacatcgaagcggcgatgggccgcgtccgatacctcgttttttatctggcgtgcggggcgctggcttccgccagccacatcttttcaaacccgacctcaatgattccctcgatcggggccagcggcgcgatttcgggcgtgctcggcgcgtatctgatgatctatccaagggcgcgggtgctggtcctcgtgccgctcggctttttcagccgcatcctttccatacccgctggtttcgtccttgggttctggtttgttctgcagttgctcgagggcgccatgtccggcgcgaagcagggaggcggagtggctttttgggcccatgtcggcggctttgtcgccgggatgctcctggtcggcctgttcaagaaacgagacgtgcgcttcttcaatcccccccagccccggccgcgcaacgtcgagtaaaatcccccgtccggaagttttccgccgagcgatcaagatctccgtcaggtcccgaagaaagagtctcccgcctttgagggcggagctccggccggtcgattctccggcgtccatcagcggtcttgacggcccccggaggattacggaatcctcggggacgacgggctcgggacgatcgccccaaaaccggtgaaggccgcgcgggccgatttgaccgtcgacgggacggctcgaccgagtgttcaagcccggcgcgggtccgagggaagcgcaacccgccttaattcaatgacgctcccgataaaaatcgaatgaattttgggttaaggcgcgggcccctggtcgacaaggctgaaggctgaggctcgctcagagcccaagttttttcttcgtggactcgatcagcccccccgcctggacgatcccgatcaccgattcgggcagggggaagaaccgaagcgtcttgccgccgctttgaatcgtcccggcggcgaaatcgatctcgacgggatcgcccgtcatgaggacctcggccgcctcatcgcattggaggacggccaagccgagattgatggcgttgcggaaatagatccgggcgaaggacttggccacgacggccttcaccccggccgcccgcaggcaggcggccgcctgttcccgggagcttccgcagccgaaattcttcccggccacgatcacgtcgcccggctggaccgacttggagaattccggatccaggtcctccatcgcatgcttggccatctcctccggggacatcaacgcataggtgtagcgccccgggaaaatgacgtcggtgttgatgtcgtcgccgtatttccagacgcgtccggtgctcatgagcgtatcctcggatcggtgatttttccctccagggcggaggccgcggccgtcgccggcgaagccaggtagatggccgagtcgcggcttcccattcggccgcggaaattgcggttggaggtcgaaaggacggcctcgcccgccgccaggagcccctggtgggcgccgaggcaggggccgcagccgggattgaggatgacgcagccggcctcgctcagcgtctcgatcgagccgttgcgaagagcctcgagatagaccgcccgggaggccggaaggaccagcgtccgggttccgggatggaccctccgccctttcacgatccgggcggcgatcgccaggtcctcgacccggccgttcgtgcaggttccgatgagaacctgctggacgggcgtgccggcgacatcgcggacgggcttgacgttgtcgacggtgtggggacaggcgacctggggctcgagcgttgaaagatcaaacggcaggacggcctcgtaagccgccccggggtcggagacgacgacctcgaattcccggaaggtccgggccttgagccaggcgacggtcagggcgtccggctcgaagtatccgttcttggcccccatctccgcggccatgttggccagggtcatccgcgaggacaggctgaattccccggccgccgggccggcgaattcgaccgcttcgtaattggcccggtcggccccctggtcgccgatgagcttgaggatcgcgtccttggcgcagacgttctcggggaaccggccgctgaactcgatccggagggtttcgggcacccgcagccagatctcgtcggtggcccagatggaggcggcttcggtccggccgatcccggcggaaaaagccccgaaagccccgtatgtcgtcgtgtgggaatcgctccccatgatcaggaagcccgggagggcgaagcccgattcaggcaggacttggtggcagacgccgttctggatgtcatagaaatggggcaggccctgctcccggacgaattcgcggatggttttgtggttctgggcgtatttttcgtcggccgccgggacgatgtgatcgaggatgatgatgatcttgtccggagccttgacccgcggcacgccgattttcttgaattcgccgatgatggccgccgagttgtcgtgggacaggcagtagtcgggggagacggtgaccacttcccccgcccggacgggccggccggccttccggctcaggactttctcgctgaacgtctgggccatggcggaatccctctcacttgaagacgtcgaaattgacgaaatcggcgtggttgacgatgatcgcctcgatcgtccgccgcccgccgtctccttccttggagtgggcggcgatgatgtggacgatttcctccgggaggccgaactggtaggcgaaggccgccccggaaatcgggtgtcggaggaggtcgccggcccggctcttgacgaaggctccgttctcgagggtgtactcgaaaagcttgccgacgtcgtggagaagggccccggccaggagagcgtcgcggtccacccggacctttccggcatattccttgccgaggacgtcgccgatgccgaccgccgtccgggtcacgttgcgggtgtgctcgacgaggctcaccgaaaccgtcttgagaaggagggtgaaaggcatccgggccaggtcgggctccgaccatccgcccttcttgaccgcttcaaaccagatcttgagggtgagctcgcggaggccgggatcggcgatctgcccgatatcgggcaaaagctcgaggattttttcgcgggaaacgctcatgggatcttcctttccggagggccgtcgtaaacatagcccgccgggtcgatcttccgcatgggcttcatccgggttttttcttcgtggacgtgggccacgaggccgggcacccgggcgatcataaaaaaggcgttcccgatcgccggcggaatgcccaaatcgcagagaagagcggcgatcgctccgtccacgttgatcggcaggggcttgcccagctgggccgccaaagcttcctcggtcaagcgggcgagacggacgtgccggccggccaggccgagctcctcggccaatccgaacagcttcgccgtccgcggatccttcgtgtgcagccggtggccgaaaccggaggcccgcttgcccctggccttcatctcgtccagaacggctttgaccgcggcggcttcatcgcctccggaggcctcggccttctgggcgatggccaggaacatccgctgtccttcctcaatcgctcctccatggaaacggttgatggccaggattccggccgcgacggcggcgttgagctccgccccggtcgaggccacggtccgggcggccagagccgagggcggggaggccccgtgatcgatggacgagacaaagatcgcatccagcagcttcccgacggcgggcgcgggcagctcccccgtaagaatcaggcagacggcctgggcgaacgagatctttcccatcatctcgtcgatgagatatccccgggccatgatccggttgggtttgacttcggtgatggccgtcggccatttttcttggttatcagacatgtcgcttctcctttgcggcccggcgttccggccgctatttctttccggccaggagcccggcgacccggccggggatgtcggccacggcctcgaccacatggacgccgacttcccgcagccgcctgaccttgctttcataggagccgcggttgccgtcgacgatggctccggcgtgggaaaaccgcgtccccgacttggccgccttgcctccgatgaaggccaccagcggcttggtgaattttttatgctcgatcaaatcggcgacccgctcctcctgggtcgtcccgatttcgccgaacatcgccaccgctttcgtttccgggtcccgctcgaacagctccatgacctcgggatgggacgagccgacgatcgagtcccctccgacgtgaacgatcgtgctcaggccgagcccggcccggctgagatagtaggcgacggccgacgtcatccctccgcttcgggagctgacgccgaccggtccgggctggaaccattccctggcccgctcggcccggccgccgatcattcccaggaccgcctttcccgggctcaggaggcccagggtgttgggaccgacgaatctcgccccggcgtccttggccgcggcggcgatatccaggacatcgtagatcggaacgcggtcggggacgatcaccagcagcttcaccccggccgccaaggcttccagggcggcgttcttcacggccgccgccgggacgaagatgacgctggcgtcgatcggcccgacgttctcgacggcttcctcgacggcgtcgtaaacggggacgccgtagacgtcctggccgccgcggcccggcgtgactccggccaggacgttggtgccgtaatccttcatcagccgggtccgggcgatgccctcccggccggtgatgccctgaatcagaactttgcttttttcgtcgacaaagatggccatgaccctatccgcgcctcatttcatttcccgccggagccggtcccggtattccttcagccccgggatcggcagctcgatgtggatcgcctgctgttcatgaaagcggcagaagatctcgcaagccaggcattccgtgcacttgcctttcttcgcctcggcctcgggaatcgccagaacgggcaggccctcggcgtcggcttcaaggatcttccacccgcacgcttccaggcagcccttggacgcgcaatggaggcaccgggaatgatcgatggacagccgcccggtgagggtggcgaacgtgtaagcgcagtccggaagccgaggctcctccatcggccggatctcgtggacagcgccgcggttttcggcgatcagctccgccaaccgggccgcgcatttctcgggcggatcgtcgcggccgtatccctcgacccgggccggcagatcctgaagataggcgctcaggatccggatcgcttcctcctcgcaattccccccgagacggaggacggccggtatcgccaggcgctcctcggcgaacgccttcaccagcccgcgggccgagttgtattgttcctgggaggccacgcccgagccggaggaaaaatagcccttgagcccgggctggctgagaatgaccttggccgcccggtagaccttgctggccggaggatttccgctggtgtcgcaataatcggcgattttgaagccccgggcgagcacggcgtccatggacatcatcgatccgccgccgccggccccgtgaaacccgatcagcaaatcgtccggctcggattgatcggccatctggagaaagtaaaacgtcccccggtggtccttttcctcgactttgtaggcgatccgctcgagctcggtcggcggacggtcgaactcgcgggcgatttcaatgcccagctcgggatgacggtagacggcgtaatcgtccacgacgagatggcagtcggccgctaaaatccggccgtcgaccgtccggaccaggggattgatctcgaccgagcgggcgtcggcgttccgggcgatcgcggccagcttggtcagcaaatcagacaaggggacaagggcagggccgctgatcccggattttcggacgacgttcagagcctcaaacccgcgcaggccggtgcggacgtcgatcagccggcggacgacccggtccgggcgtcggcgggcgatctcctcgatccccgtcccgccgacggagctgaaaacgaggagcggggccttggcttcgtcgtccatgacgatcccggcgaagtactccgcctcgatggccagcttctcctcgaccaaaacgcgctcgacgacgtaattcttgaccttcatcccgagaagggcggcggccttggtctcggcttcggccggagtgtcggcgaactggatgccgccgagaccggcccggccggtcacccagacctggatcttcaggacgaccgggcggccgagacgctcggcgatcgcccgggcttcggccggggaggaggcgacggcgccttcggggaccggaaggccgccttcgcggagaagaattttgctctggtattcatacaaacgcgccaagggaatctctccacgaaagaaggtagagggcattataacggaaacgccgcccggtcgccagcctaaggggagtcagacgggatttccggcctccggggatttgggcttcagcccgtagattttgactttataggaaagcattctctccgtaatgccgagcttccgggcggccgcgcttttaaccccccccgaagcctccagggcttcccgaatttcccggatttcgaggcgtttgaccttctcctcgagagaaaccgccttccccgggaacggggaatcggcttcggaacggacggtcaaggaccgcgggagatcctcgcttagaatcatgtcattttcacagaagacgacggctctttcgacggcgttttccagctctcggacatttcccggatacggatgacggaccagcatgtctaaggcttcctctgaaatcccgtggacggccttcttctcgcggagcgcgtatttcctgagaaaatgatcgaccagcggcggaatatcctcccggcgctcgcgaagcggcggaagggcgatccggatgacatccaaccggtagaacaagtcggctcggaaagccccctcgctcacggccttctccaggtcccgattcgtcgccgcgagaacgcggacatcagcgcggaggactgcggtcgagcccaggcgggaaaattcgcggtcctggagaaagcgcaggagcttgacttgaagatggagcggaaggtcgccgatctcatccaggagaagcgttccgcctccggccgcctcgaattttcccgtcttccgctcgccggccccggtaaacgctcctttctccgctccgaaaagctcgctttcaatcagcgattcggggagagaggggatgttgaccgccagaaagggacccttcgcccgcctcgaggcgaaatgaatcgaccgggcgacgagatcctttcccgtgccggtctccccggtgatgaggacattggcatcgctttgagacgctttcgacatgagccgcgacacggcctccatggccggcgaggcggaaacgaaattgcgcgcgctgaatttgtcgaccagggtttcccgcaggctttgcacctcggcccgaaggcgatgccgctccaaggcccggtcgatgatcagaagcagcttcttaaaatcgatcggcttgacgatatagtcataagccccggccttgatcgcctcgaccgcggtttcgacgctggcgaacgccgtgatcatgatcggggccagggcgggattctccttaaggagaagacggatgacgtcaaggcccgtctcccggccgagcttgtaatcgaccaaggcgatctccgccgggagacgccgcatttccgccacggccgacgcttgatccgccgcgtccgtcacgacgaagccttcgctctccaaattcccccggatgagcctccgctggagaggatcatcctcgacgatcaggacgatcgatttattcatcctttttcccccgggagctcgatccggaagacggatccccccgatcttcgttcggcggccgaaatccgcccgccgtgggcttccacgatcttgcgggccagaaagaggccgactcccaatccatcggctttcgttgagaaaaacggctcaaagatgcgttcccggtccgccgccgggatgcccggcccggaatcctcgacggaaatcaaaacaccggccttgttcttttcggctcggatgacgatctccccgtccgcggaagcttcgagcccgttgcggacgatattgaacagggcctgggcgagcaagccacgatccgcccggaggcgcggcccggagcccggctcccgccggatcggaatgcccttggaaaccgcggcgggggaagccgcctcgaccgcgtctccgatgacggcgtccgcctcgatcgtttccagccggagatccagcggccgaagcacggccgagaaccggtcgaggatgcgggagattttttggacctcgatccggccgagggccgcgtcgccggccaggacgtccggggcgttcttttccatcatctcgcagagaagagcgaggctgttcagcggattcttaatctcatgggcgatcccggcggtgaatccggacagctcgcggaatctttctttttcctggcgttcgcccgcggcttcctcggtccgggccaaggaagcccgatgcatccgataaatcccgctgaagagaagaaggcccacggcgcccagggcgccgaaaagaaggagggcgcttcgccgtgaataggccagcatttcatccaaccgcgacagggaatatccaagatagagagaatagatccggtcttccttcgccgggaatgtcctcacgacgttgagaatcgtcccggcgggggaatcgatggcccagctttccggatccgaggcgggccggccggcgatcggaagatatccctcgaattgagaggaccagcccagcacattcccggtctcgtcgacaagggctaagaaatagatgtccgtctccccggagtaacggtcgagggcggtttgaggaagaaccccctctttgagccgctcctcaaattcagcggccaggatgcgggcggaagcggtcaactgctccctgaccagggcctcggtttttcgcttgaggaattcccggctcagggcggactgaaggaaaaagagaacgatgattccggccgcgggaaggatgaaaaaagcccaaaactcccgtcggcgcaattcaacggccccgcttccgtttccccgcctgccgagagcctcccctccaattcgggaatccccgggcatcccggacccggacgatctccccctggagttggacttccctggcgatcaaaaccgcctctgcgtctcccgccggagccaacgatccgaggacgttcatccgctcgccctgatggacgtcatgttcgaaaaaccaggccgggccgatttcgacgatgaaacggcggctcgtcttgggctcgtccaaaaccaggatgagaaagggagccgctccctgataacgaggctcgaatcggatggattgaacgacgccctcgatccggatttccgtctttacgtcataataatgagcggacatccgcggccggccttgcggcggggaagcctggacggacgccaaaagcgcggcgacggcgaaaacgacggatcccgcgtttactttgcgccccaatcgaagccccattgcaatcctcccgaaaggaagcccccgccccagtcaaaaagcggatcgttggacgcgtttcgaatttgagcgtacatcaacttcaacgaccaacggccgaaatccttttcggccaaaatctcccaacgggagcgtttgtcttcccgggtgaagccgaggggattcccctccaggtcccggctctcgatcccgggaaaagtcatctccgtcgtattatagcccaggcgggcgctgacgttccagggaagaagagccgacaactgggcattccagcccaagccctcccaggaaaaggcatcggaggtcgggttttcgatcatcatgaattcctcgaccgtggaaaagggattttccccggatagattccattgaatgatccctcccaggcgcagccccaccctctcccccaatccttgggcggcccgggcttgaaacgaggcgacttgaatccctttccccgccgcggcttcggcgaccggagcgtattccccgccccctcggtttccgccgccgtatcctccatgccgatatcctccgtttccgtacccgacatatccgaaaccgccgcccccctccggtggaacgaggccggccgcatcggcttccggggcgatcgtctgcggatggaaaaagtatttatatccccagccgagctcggcttggagcgtcgtccgcgaggagaagtacttatccagcgaaacggacaagccctggctgagaaaatcgaacggcgcatagcgatacgaccggaattccgaaaccgccgccgccttgaaaatggaagagggcgtcaaatagcttttcaaagaagccgcgatgcggacgccttcgtagttgaagtcggaatattcggcctggaatagcgaggcgtttcccgcgaccgagagatacagggccgttttatctccgagcgcctgaaggtaatccgcgcctcccgacaaagacgccaggctcattcccgaattctctcggagagcgctgtaatcgagaccggcgaaaaggccgaactccgagaaggatttctcccaggcaatgccggccgcggtcatcgcgtccgcggcggcgtaccgggtttggaagaggttgtccgtccagttttgaacgagagacacggaaagcgaagcggcggacgatgaccccgcgaaaacggcggccgcggcgccgaagataaaaaatcgtttcatgatcagccccggtcgttatgattataagggaaaaagggccttccggccctttttccccgtcattgtctggaacggccggctcgagattcccgccttatccacggccccggcggacggatcggccgtgaggacccgtgccgtcgcaaaagcccggtcccgttcctctgccgcggaacgccgctttattccaagagtttgcgattccctcggcccggacacccccccgccgattcccgttcttgtagcccgtcccatccttgggaggcgcccaatccgggtcccggccgttggggatgccgtcattgtcatggtcccggaaacggtcattgatcccgtcgcaattttgatccatgaacttgtgttggaaccgccactggaaatgattccgggcattgatttcctttccaggcgaattcggggctgtcgcggccagggctccggcgccgagaacgccgaggacaaggatcgatccgatgataaaaccgtttttgagtctcatggtttaacctccttcatgagttcaagcctcatgtatgcgggaggcatgccaaattatatatcattgataatcaataagataattataatataaagacagaggggccgacattttcgtcgatgaaacgacggaattgtcggaatccggggattccgattcgataactccgctcccatcggcgcggtattctccttccccgaaattgacttcatgattccgtctttctatattgttaataacaatcggaaaagggccagcggatgagcgccttgccgccgggcaggatttgtcccaaatgccaggcgtccaatttcgcgtccgatgtccattgcttcaactgcggggcgaatctcgaggacgaaacgacgctttccctgcccgataagccggacctccccgcggcgaccgatccgctcgattttcccccgggagcgcgtttcgccggccgctatctcattgtcgaggaaatcggcggcggagccacgggccgggtcttcaaagcccgggacacaaagctggatcaaaccgtcgccctcaagatgatccggccggagcgcgccgcaagtcccgaggccctcggcttctttaaaaaggaaacctcgctggcccggtcgctctcccaggaaaacatcatccgcgtctacgacctgggcgaaagcgaaggcgtgacctacctcacgatggaatgcgtcgccgggcagagcctggatcagctcctgcgcgcctccggccccctgaccgagacggcggccgtctccatcgcccgccaagtttgccgggccctggccgccgcccacaagaaaggaatcgtccaccgggatctcaagccgcaaaacatcctgctcgacgccgacggccgggtccgggtggccgatttcgggctggcccggtcgttcgagctcccgtcggggaaagccccgggccggatcgtcggcaccccggcctacatgccgcccgagcaggccgcggggagcgaggctgacggccgttccgatatttattccctgggcgtcatcctctacgaaatgctgaccggacgaaggcctttcgccgccggaagcgccgccgagcttctcgaaaaacacctccatgaaaaaccgaagccgctccggacctggaatcccggcctctcccaccgcctggaacagacggtcctccaatgtcttgaaaaagatccggcccggcgcccgccgacggccggacgccttctccagtccttggaggaacggggaaaaccggcccccgccgcccggcgggccgcccgcttggttctccccctcggggcggccgcccttctcctggccgccctcggcctgtttctcgtcgtcacccggaaaccggcccggccgccggcccccggaacgttcccctccgtggcggtcatgtatttcgagaacaacacgggcgatccgagcctcgattacctccgcaagggattatgctatcaagtcatccaatcccttctccaatccgcccggctgcgggtcattacgaccgaccggatgttcgccatcctccgggacaagggccttctcaaaaacgagacgtattccaccgacgacctcaagcacgtggccgaacgggcccaggcccgctacatcctccagggcagcttcgcgaaaatcggccgggtatacaagatcaactcttttcttttggacgcggaaacctgggagacggccggttcgacccaggccgaagtggaggacttgagccagctcaacgccgccgtcgagcggatgacccccgcggtcaaggcgtccctccattcccccggcggcccggcggcggcctcgtccagcggggggctcgacaggatcaccacccggtcccccgaggcgctcaagaatttcatcgagggcgagacgctgtttttcgaggggaaattcgcggaaagcgccgaggcttaccggaacgcgatcgggctcgacggagacttcgccctggcttaccgcggcctggccgcggcctccctgtaccaaagcaagcgggctgaagccaaagccaacctggaaaaagccctggccctggccgcggccggccgggcttcgccacgcgaccggcatctgatcgaagggctttacgacgcggtgttcagatcgtcgtttcccgacgaagccgtccatcagtaccggcaagtcctttcgatctcccccgacgacgaggaggggctccgccacctgggttcgctttaccggaatctcgaggaatggagcaaggcccgggactgctgggagcggctcctggccctggacaaattcaatccctttctctatatcaacctctcgaccatttacttggccgagggattgcccgaaaaagccgtcgacattcttcccgaagatcccgccttgctgcctccggccctgcgccgccggcaggtcggcctcatcgatctctgccggggccggtacgaagacgccctggccgcggtcaaccaagctttggagcaggaaagcggacaaaccacggcacttcttctccgaggaaacatccgccagcttcagggtgacgcggccgcggcccgagaggattatcttcggatcatccgcgacgccgacgccgcctctcaagccctcgggctgaggtttttagccgctctttgtcttcaagaaggccgcttcgacgaattccggagccgggtcgcccagggactcgacatctcccgccgaggggcgatgcaggacgaggaagattcctttctcctgatggaagcggccggttttcaacttcgggacaatcttgccgcggccgaggaaagcgcccgccgggccgtccgcctggccgaggagctgaacgacgtgatcgtccgggccgaaggtctcggccttctggggcatgtcctgctcgctcggggcaatgccgccggggccggggaaacggccgagcgtctccgcctcctcaccgaaacatccggccttcgccatctccggaagcattatttcaggctgaagggagcgatcgcccggcaggcgggagactacgcgtccgccgccgacctgggccggatggccgtcgccggattgccgttcccctattccctgaacgatgaccacgccgtatactacgagtctttggccctcaccgccgagacggcgggagatacggacagggcgatcgggatccgccgggacatcggcgccctgacctcgggacgtcttctcttcggggacatctacggccggaactactaccgcctgggaaaactctatctccggaaaaatctcaaggccgaagccgccgacgcgttcgatacgtttctccgcctgtgggcccgggccgacgccggccggcccgaaatcgccgacgcccgggaagagctggccgccctcaagattccgggaccgcggcccgcctccaaaaccgttcccgctccgtgatcacgatccggctgatccggcagtgggcgacggggaccaggccgaggatcccgctcttcatggccgcggccggcgggcagaaggcgcagcgatcgagccaagcgcagccggcgcacggccgttcccgcgtttgggcgaggtccatccgcccgccgctgtaagcggcctggatccgcggatcaggattcccgccggcccggacgaaatccgcgaccgtcccgaaacagaaacggcggagcacgtccgggcggggatgggcccggtggaaatcgacgaaccggtagcagccccacagccgcccctcggggtccagggcgaggcgatcccgtcccgccggacagacgaatatcccgggagccggcggccggcggagattcaacaacggcacgtccttcccggtccgggcatagtccaaaagagcatccgcggcggcgcgaagaccgtcggaaagccggttgagagcggccgtcggccaggggaccgtgagatcgaacgacacgaggatctccgggacgcgccggtcgacgaggaaggcgatcgtatccgccagcgtgcccaccgtccggggaccaaagacgctgttggtggccggccggatgccggggtaggcggggagcttgtctaagagggcggtcagcctccgataactccctttccgcctttcttggtcctgggacggaccgtcgaagctcagcatcagagcgaagcgatgggcgtcgaggaaagagaggatttccggcctgagaagggagccgttcgtcgtcagggaatagcgcgggagcgtccgggaatcccggctcctcttttccagctgctcaatcgcccgccggatcaagtgaaaagccaggagcggctccccgccgcaaaactggatcaggggagacgaggagagataaggaaagagggccgcgcaggcctggtccaaggtcccggcttcgagggtattcgtcccccgaacccgggggcagtagcggcaccgccagttgcagcgctccgtcagggtcagggaaaggccggccagcactccccttcccggcgggctcttccgctccggccgaacgcgagccgcggccggccgggactcaaggcggcgggccgggtcgattccgccggaaaacggaagaaggctagccgccaaaggagatcgacggccgatcgagcggacaggtgcgggccgctgttcgctcgaacattccctccactttcgtgaaaaccgtctccatctccttgaggcaagagacggccgcttgatagcgtttcttttcggcttcagaagctccccgtccgggccggaggccccccaggtattccttcaggtaagcggtcatctggaagagggtggggggggccgaggatagttttttcgacactcttttcctttgcatggcattcctcctgtttggcttcaatatgcgccgaagaaaaagcgttgtcaacggccgaggagacccccgaacacgagacgggaaaggacggaccccgcctcgtttcgcgcgccgcgggggcgcgggaaggatatgagcggaaggacatgcggcggtcttgaaaaagaagcgggcgcttctcaattcccgcggaaggagcggggatccgagcgccccttgtttttcgccggcggcgcgggacgcggcttggtcccgggcgcggggcgtcccggcttcgccggctggggaacggcggcttcgattttccctcggatgtcccgcaagatctcgttcaggcgcttggccgaaatggagccgacggtcccgacctcgggagcgaaaaccgcgatcttgtattcctcgatcatccaccggacggtctccagctcctcccgaagctcggccgggccctcggccccaagccgttttttcagtccggccagcgcctcggtgaagggaacgatttcggccgcttttttccgatccttttccgggctgttcttagcccgctcggtccgaagccggagagcctcaaggtaggccggaagacgggccagccggccggcggggtagacttcggcgaagtctcggggcatcagggcgtccaactcggcccgaaccgtttccaaaaccccttccaccgctttgtttccctggtgggtcatgccgatcgtgtaaagatcggcccggacggcttggtacgcctcgagcgcccgcttggccgcgtccaaaagaacctgtccctcggcgaacagtgttttcaccagccggtcggcgaactcctggtattcaagccgcgttcggatctccttgcggaacacgcggacgcggagcccctcgagaagggacttttccaaggccgctttcccgccgaaatacagggccgcccgctggtgctcctcgggcaagaccatgatccgctccatgaacttgaggtcccgggcgaatttttttgagagaagggcttcgacgccgcgcggatggacggccgccgcctccccggcggttttgaaaagccggaggcccgcgtctttcggtccggggacaagcgccggataggccgccggcccgccgtcgagccggatttccgcgggaatcgcgtcccattcccagtccgagacggccggccgctcccattcgctcgcggcgttcttccaggaggaggacgcggtgtcggccacgggcgctttcggccgcaagccgaggagcttgccgtaatcgcgtcccgagaacgcttcctttccggccgcgtccaggacgaccagccggatcttgagatgcttcggcacgtcgacggattcccaaacgtccgccggaacgtcggcccggaaccgtctccggacaaaggcggagagagtcgcggacaacgggcccggcgtccggggcatctcccggacgatcgtgtcggcccgttcggccgccgggacgagggctttccggtagcgctggggaagccccttgacgagggcgtggattttttcccggaaatatcccgggatcccccattcgagggcgccgatctcgatccgggggagaagatccgccttgatccggatcgtcgctccgtcctcctccgttccggggaggaagcggtactgaacccggattttccgcccgcccaggcttagatcgtcgggatacagggcgatttcagaaaccgccggcttgaactggacgagatcgtcctcggccatgacaagaaacgcgtcaccgccctgtttctccaggcatcggctgaggcccttgaggtcgtaaacgccgggcaagcgccgggcgtaaaattccgcggctttctcattcgggacgaggatgtcccgccggcgcattttttcctcgagcgcctcgaagcggtcccggagctggaggttgcggcgaagaaacgccggaggattctttacccggcccgcgcacaaggcctcgcggatgaagatcttcgaggcggcctcgggatcgagggggccgtagggaacgtcccgatggacggcgatctccaggccgtagagggtcactcgttcctccacccggacatcccccctgtttttatcccaccggggattctcgtgcgccctccggcagagatctccggcgagcgattcgagccagccgggttcgatgcgggcggccgtccggacatacagccggccggtttggacgacctcggcggcgacgatccaggccggcggtttcccaaacagcgaggaaccggggaagagcatcgcttcccggccgcgggcggccgtgtacattttcccttccttgaggacggccacccgggacaacaggccggaggccgccgcccggtggatcgccccgtacaggggccgggacatggagccggctttggtccggacggcgggaaatttctgctcccggagaatctcgaggatctggtcgtggatgtatgtccattcccgcatccgcgggaaggaaaggaaatgctcccggcagaaccgccgcttccgggccgaggaccggaggccttcccaatctccatgatagcggtcccaaatgttcaagagcgtcaagaaatcggaatcgggatcgcggaagggcgcgtgggaagcatcggcccgggcggcctcggcgggcggccgctcccggggatcgcggatgctgagggcggaggcgatgaccgcaatctcgcggagacagttctccgcggccgcctcgatcagcatccgggagaggcgcggatcgagcggaatccgggccatcctccggccgcggtcggtcaggtggtaatcggcgcccctcttccggaccgcgcccagctcgaccagggtctcgaagccgtcctcgatcatccgggccgtcggcttgtcgacgaacgggaacttcgccggatggccgaggttgagatccatcatccggaggatgacctcggccaggttcgaacggaggatctcgggcggagtgaaccgcggccggtccaagtaatccttttcctcgaaaagccggatgcacaatccgtcgctcacccggccgcagcggcccttccgctggtcggcgctggcccgggagaccggccggatcggaaggctgttgatgcccgccccggggaggtactgggagatccgggccaggcccgtgtcgacgacgtacttgatgccggggatcgtcagggacgtttcggccacgttggtggccacgacgatcttcggtccggcgacggaataaacccgtccctgccgggcccccggcaggcgggcgaacaagggcagaatcgtgaatccgggatagcgcttgccctcgaggatctcgcaggtttccaggatgtcctgctccgtcggcataaaaacaaggacgtcgccgggcggctcgcgccgcaggaggtcgtcgacggcggccgcggccgcgtcgacgtaatcgacgtcctccttttcgtccggcgccggcgtccggtattcgacgcggacgggatacatccggccgccgacctcgagcacgggcgcgccgtcgaaggcggccgcgaatttttcgagatcgagggtggccgaggtgatcaccaccttaagatcggaacgcttggccaggagggtcttgagaatccccaggaggaagtcgatgttcaggctccgctcgtgggcctcgtcgatgatgatcgtgtcgtattcacggaggcggccgtcggcctgggtttcagccagcagcattccgtcggtcacgaccttgatccgcgtttcgggcgaggtttgttcctcgaagcggatcttgtagccgacggtccggccgagcggttcccccatctcctcggcgatccgccgggcgatcgtcacggctgcgatccggcggggctgggtaacggcgatccggccgcgcgacccgcggccggcttccaggcacatcttcgggatctgggtgctcttcccgcagccggtctcgccggaaatgatgacgacccggttcttgcggattgcttggaccaggtcgccgcggcggcgggaaatcggaagctcggggggatacctccacttcagccggaccggcggtgcgccggcttcatccgtcatggcccgcctcccggccgtggatcgttcatgggccttcattctggcacgcggccgcgggggagtcaattacaatgaggagacataagacctattgacttcattgcgcgtcccccggcggcagaggattggatctcgggaaatcatgttaattggtattgtgtcccctctttatcatgtcttgctcatgtcgagggcccagcgggccatatcggcctcgggcggccggtaggtttcgaaaagatcgagcaggcgggccgggtccggatcggagaggatcatcgcccggtgctcgggctggaggaacttcaacgcctccgcccggaccaggaatcccaggatcggatcaaaatagccggcgacgttcaggaaaccgcagggctttcggtggatgccgagctgggcccaagtcacgacttcgaagaactcctccatcgtcccgaggccgccgggcagggcgatgaatccgtcggacaatccggccatcagggccttgcgctcgtgcatcgtctcgacgatccggagggcgccggcctcggcgtaggcgagctcccgctcgaccatgtcccgggggatgacgccgacgacccggccgccgccctcatgaatcgtccgggcgatctcgtacatcagacccacccggccgccgccgtaaacaagacccaagccgcgacggaggaattcccgccccaggtctcgggcggcggaggcgaaggccggttccgctcccgggctcgaaccgcagaaaacggacacgtttttcatctcaatacaccgccaagccgagggccgccgctccaaccacgagccaaacgggattggtctttgtcaacgcgaggagggcgaaagccgccgcggcgatgaggattttatcccagtgagccgccaggaccggtccgacagccgcgtttttcaacccgaacacgctcacggccatgtcgtaagccgtccagagaaggaagccgatgacgaccggacggaccgcgcggagcatggaaacgacggagggagaatccttgaacttaaaaaaggcgatgaccatcgccagcatcaggagggtcgccggaaggaccgtcccggtcacggccatgaccgcgcccggaaagccggccatcttgtatccgatgaaggccgaaacctgcggggcgatcgggcctggaagagcgttgcccagggcgaccgcgtcggcgaactccccggacgtcacccaaccggcggacgtcgcctccctctgcatgagagccagcgaggccggtccgcctccccaggaaaacagggcgacccgggaaaagacggtgaaaagcttccatagcattgtcctcgactcctccgcggggcgccctctgaaggccgccccgccccgccgcatcatcgtaaggtgtccagcggcctcttgtcaaaaccggctgcgagaaacgacctcccgtttcgacgcgacgccccgcgatctcctctttttggggcgaggattcttccctcggcggaggaaaagttctttagaaagcttccgcctggctcaaatccgggtccctgtgttaagatgcgcggggaatttaagcccgcaggagtcttgcatgaccggcctttccgtcctgatcgcccttcttccggtgatcctcatcctcgttcttctcatcgggcgcaagaccgccgccgacaccgccgggctggcgggctgggtcgcggccgcggccgcggccggattatatttccgaacgcctctctcgatcatcctcaagtccagcctcggcggcgtgctcgcctcgcttccgatcacgatcatggtcgggacgtcgatttaccagatcaccgtcatgctcgagaccggggccatctcccgggtcgtcgccctgatcaagaccctggccccccgggacaagatcatccagatcatgatcatcaacgtcggcttcggaacgcttttggcggccatgggggcgacgccggtttcgattcttcccccgatcatgctcggcctgggctattcctcgttcgtggccatcgcccttcccgccctcggatacgacgccttgtgcacatacgcccttctcggcgtgccggtcgtcgtcttcgccaatttcgtcggccttccggtggagcaggtcggcggctatttcgcccgcttcatgcccgtcatcacgtcctgcatcgccctggggatgctctggatcgccggcggcctcaagacgctcctcaagggcgtctttcccgccgtcctggccggcgtaacggccggaatgatcgccatcggcatgaaccaagcccgcatggtcaccctgaccggggtggccgccggcctcggcgtcgtcctggtcatgttcctctatctccttatcgcccggaaaccgatccgggaccggagcgtgctgacggacgccgaccgggccttcgaacaacggatgtccctcggccgggccgtttcgccttggatcatcctgaccgttttcgccgtcctgatcaacacgccgtcgctgccttttttccgcctggtcttcgaccgctgggccatgcccgtcgaaatcattcccggcgcccccgaaaagctgcggctcctctggcaggcgtatttctggattcttgtcagcacgctcctggccctgccgttcctcaagccctccaaggcgcagctttccgcttgcgggagaaaatggctgaagcgggccccccggccgatgctggcctcggccgtctttttcgccatcgcctacatcatcaatcattcgggaaaagggccggactggtcgctggccgagccggggcataacatggtctacgtcctggccgccgcctccgcccaggccttcgaccggctctatccggccgtggcctcgttcctcgggctgctcggaggcttcctcagcggatcggagacctcggccatcgccatgctgaccaagcttcatctctcgaccgctgaaaagatcggggccgccggcgtcgtcatcgccgcggccagcgggatcggcggcgggctggccagcgtcatctccccggccaagctccagaacgcggccgccagcatcgaccgcatcggcgaagagggccgggtcctccggacgacgtttgtgatctccctcttcatcacagccgtctgcgccgcgatgagcctcctgtgggcgttttaagggatccggttgttgaaatcgggccggacggcggggttcgagggaagctcgcgttgaacgcccgggggacctgtgatacaaaaaggcccatgttccgcaagcccgccgccgtcttcattgtctttttattagcctccctcctccctcccctcgccgccggggaagcggacgaaaaagagtccgggacgccgcggtggatcttctccttcgccgagcggatccgccaggaaagctccgacaacgtcgcttccctggatgaatccaaaaccgattcctcctcctatatgaggatgaggacgaatctggcggtctcatggaagccggcggaaacgctcgccttcgggctgcgcctggccaacgagatgagatattacctgtcccccaagaccgacccgaagctggggatcaatttcggcctgaatgaagtcgtcatcgatcagctctacgcccgctgggaccgcccggccgggctgcccctcgccctgaccgtcggccgccaggacatccagatgggcgagggattcgtcctgatggacggcggcccgggcgacggctcccggacggcgtatttcaacggggcacgggcggatgtgaccctcgcctccggccaaacgctcaccgcgttctacgtcaaccagccgcgcaccgatcgatttcttccccgcctcaacgacgtcggccagatcatggtcgaacaggacgaggaaagctacgggctctatcacaccggcggcttcggaaaaacgaaattcgaggcctatttgttccggctcaaccgggaacgccgcggcctgttccccggcgcgggcttccagacggcgggagggcgcgtccaagcccccttggccggccgtctttccctgacggccgagggcgcgctccaattcggccgccgggaagacgatcggaaaaccggcttcgggggatacgcgcgtttagattacgcgaccggcgcggccggggcgcttccggcgacgctcaccttgggcgggatttggctcagcggcgacgatccggcgacctccggccgggacgaaggctgggatccggccttcggccgctggccgaaatggagcgattcgctcatctatcttctcgcccgggaaacccgggccgccgattggagcaatttcacttctctttacggaagcctgggattcgcccccgcctcaaacatcaagctgaatctcacctggcatcgcctcggcgccgcggaacggacggagccctcgaatctttggagcggacaaggaacgaggcgcggcgacctgggcatcctgaaggtggtctacgagatcagcccccattggcagggacattttctctgggagcacttccgtccgggcgacttctatttttccggggcccgcggttacgcctggatccgcttcgagcttttgatcaagtattgacccgggaccgaggccgagccggcgagaagcggatcggcgccctccgtcccggccggacgaaggggaaagcggacgccgcgtcttagaaccgcacgttgaggcccgcttgaacggccccctggaacccggcgcccagctcggcaaacaatcccagcgatccggccaggcggaggttcgctcccaagagcgtcacctggaatcccatgaattcattctggtcgaagatccggcaccaacccagaccgatccccgaataaaggctgaaagcggcgccgtcaagataatgaaaccgggccgttccgaggagagcggccgttttcgacgtgcgcgtctcgtcgggatgggcgcatgtcgcctcgatttgttcaaagaccgcagtcaggccgaacgctcatctccggtcgggatggtaccggtaggaaaagctgatcgctccgcttccccggacatcctcgatcgtctggcctccgatgaacgtgacgaggtcttcgcccagccagaccagaatctcctggatggtgccgaagccgaagcccgcggaaatctcatgcttccggaaagacgcctccccgccggccaccgacgccggaaaaccgattgccagcaatccgatttccaaaacaaacgcgatggctttgttccccatcttttcctcaattcaacgaatgaccggtgaaattataaaatttccccccagccttggtcaagaggggaaaagcccttccccggatcggacccggggagagggagccttcgattcgtttaccggcgcaggggatcctcgtccaggacgcggccgagcgtttcgacgaggcgctcggcgtcggccgaggagaaacaaagcggcggcttgattttcaggacgttgtggtccggcccgtccgtgctgaaaaggatcccctccgccctcatccgctcggcgacataggccgcttccgccgccgccggaatccgtttcccccggtccgagacaagctcgatgccgagaaacaggccgagaccgcggacgtctccgatcagggagtgatcgagttggagccgctgcaaaccggccctcagcaccgacccgacgcggagggcccgttcctggagattctcctgctcgaggacgtccaagacggccgttccggccgccagcgagacgggatttccgccgtacgtgttgaaatattccggccccgaggcgaaggcgtcggcgatcgcccgggttgtcacgaccgcggccagaggaaagccgttgccgatgggcttgcccatcgtcacgatgtcggggacgacgccctgggtctggaagccccagaaatgcgttcccacccggccgaatccgacctgaacctcgtcggccaggcagacgccgcctgccttccggaccctccggtaaacgtcctgaaggtatccgtcgggaagaacgatctgccctccgcagctgaggagggattcggcgatgaatccggccgggaggcggcccgccgccgcaatccggtcgagacaactcgagacggagtccgcgtatttccgggcggcctctggatcatccgcccggtatagccctcggtacacgtcgggcatttcggccgcctgggtgtgggccggccggcccgggcctcccggggcgtcgtatttgtacggactgatctcgatcaaggaggtcagatgcccgtggtacgccccccccaggacgatcatgtcccgccggccggtgaaatgccgggccagccgcaaggccaggtcgttggcctcgctgcccgagttcacgaggtagcagacccggagagccggcggcagggtcgccgtcagccgctcgatgtaccgggccagggtgtcgtggagatagcgggtgttggtgttgagaacggcggtctggcgctggacggcggccacgacgcggggatgggaatgcccgacatggggaacgttgttgaccgcgtccaggtacatccggccggtgtgatcatacaggtgctgcatgaacccgcggacgatcttgaggggtttccggtaggcgacgctcaaggaggggccgaggcgttcccggcggacggccaggatctcctccggcgtccgtcccgtctcagccgtctcggctggctccagcccgagaatcaggttcgggttgggacagatcgcgcgccagacgtcccattcgctcgcccggcagacgccgggataattcccctgttcgtcgaacaagtcaaggatcacttgaaagtggagatgcggcggccaaccgccgttttccggcatcgtccccaccgtcccgatccgttcgccttttttcaccgcccggccgggcgtcatcccttcaagggacgcccggccgaggtggccgtacagcgtccagaaaaccagcggctcccccccgggcccggccgcgtcggcccggtgttcgagaatgatcgtcgggccgtaatccaggcgttcggcgttgtcccgggcgaagatcaccgttccctcgaacggagcgaacacgggagtcccggcggcggcgaacacatcaattccgagatggacggtccggccctcggcgtacggccggccggccggccggaaattcttcgtcgtgtaaacgatccgggcctcgccgtaccggccgaggccgaagacggccttttgggctttcattttctcggataaaagacgggcccagccgacggtgtcgtcgacggtttcaggatttggaaaaagcggtgatccgacgcttaaatcgaagacggttctcgaggcggttttgagaggaacccccatcaccggggcgaaccccccggccgcctccgtcaacgcaagccagtcgcgaagccggccggccgcgggatggggagagcggccgcaggcccggcggaaaatcgattcggcgaaccgtggatggacgctccgcaggcggtcgagcagattccaggcggcctcgttcgagatctggagatacgcgttgtccggacgcgcgcccgactgccgggcgcagatcgcaacgctcattaagagccggagaacggccaggggatagagggcctggatctccacgtcgtccagaggctggacggaatgataaccggcggcgagggcggccgcggccgggagcggctcgtccgccccgagcatggcgtacgcgcaggccacggccggctcagccgttgtcaccgagcggaccatgtcgccgaaatcgatcaagccggcgatccgccgccggccgaacgtcccggccccggcctcgggcggtccgacgatcacgttgaaatcgttggcgtcgttgtaaacgacgctccgcggcaggcggtcccagaggggcgccagaatcgccgtcatccgttccaggagaaagacggccaggccggaccgggcgggatcgccgatcaagggaaggttctcccggacgatccgctcgccgttttgcagatcccaacggaaatcccggcgggcggccggatgatcgaaggaagccagccgtcgggtcagtcggccgaggatgccccccaaatccgctagaagctcgagcggtcggggatggaccgtccccaacggcgtcccctcgataaaggtgaccatccggacggcgtgagggacgccgtttttgtcctcgatttcggcgatcgaccggccccgcgtgtcggaaatcacggccgggaccggaagcggatcgccgccggatcccaggtgtcccatcgccgcgttttggaggtcgaggaattcgggattttcgtccgggttggcgatcttcagaatccgtcgctcgccggaggcggacgtgaggagaaagttctggtcgcgctcgctcggaagcggcgcggccgatcccggaaaaccaaaaagggtccgggcgaaggcctcggcgtcccgcggctcaaaccgcggcgcccgctccaccgtcgtcatcgactctctcgcccgacgaggatcagctcggtctgcggatgggatagccattcggatcccgtctcggtcacgaggatcatgtcctcgatcgtcgcgacgccgcggccgggaacggtcagccgcggctcgatcgtgaagaccatgccgggctcgagcgtccgaaacggcttctgggcgtatttttcccaggccggtcccaggatcgccgtcccgtcgtgagcgaaccggccgacctggtggccgagggcatgaggaaattcctcgtagcccgcggccgcgagaacagcccggctggcggcgtcgacgtcgcggccggccgcgcccggccggatcgcctcccgggcggcctcgatcgagcggaggagcgtctcgaatcccttttggacgtcgaccggggcctcggtttcccctttttcaaggacataaaacgtccgctgcatgtccgagcagtaatgatcgaccttgaccccgaaatccatgttgagaagatgcccgggccggacgatccggccggtcgggttgtaatgagcttgggccgtgtcgggaccggtgtagacggccggacaggtttcccgactccaggccgtcggcagcccgcgccggacgatctcggcatacatgaaatcggcgatatctttctcggtctttccgggagcgatgaagggggcgaccagggcgtagatctcctcggtgtgccggatggcttcgcggatccggctgatctcggcggccgatttccgctcgcggagggcggagaccagcttttcggccgagacgaggcggtcggccatcccgatctcctccagggttttctccagggtcaggtacatgccgtgggtcaggccgtcgcagatctcgctgccctcggaaaagttcacggcgatcgtccggggattcagctccttcaggacggcctgaagaggctcgcggaacccggtgacataagaagtgacgtcatcgtaggcccccgtgtcgacgaccatttggcggtcgtacctgccgacgatcgcccgggtccggccgtcgcggccgacgaggaacgccgaatgccaggtcaggtcgcccgggaccaaaaacggcaggaccggatccccgttgacggccgtttcccggacgaacgtcagccagcaatcgcagccgaattcacggagcaaatccgcggcttgatggattttttccttgatcaacatggatatctcctccggcggcccgggccgcccgcccccgcggccggcgtcaggacgcgaaccgcttgaggcgcttcatgaacaacaaaaccagcacggccgagagcaccaggagcccggtcagcagcaggaagaactggtggtgggccatgtcgctgtaatactttcccagccagcccgatccgtagcttccgaaggcgatcgcggccatccagccgcccatcatcaggccggcgattttcggcggggcgaccttcgagacataggactggcccatcggcgagatcaggatctcggcgatcgtgacgatgaagtacgtcccgatcagccaggcgggcgacatgttgttggcatccttgtccccgccggccagggaagcgaaaaccatgaccagcatggccaagcccatgatcagcatcccgaggaagattttcgtcggcgtcgacggctccttgcccttggttctcaaccgggcgaaaagggccagcaggaccggcgtcaggatgacgatgaaggacggctcgaagaactggtaggtttccggccggaggaacttgtagattctcgtcgaccgctcggcgaacagcgtcaggccgaagaaatcctggtagaaggccacccagaacaggatgacgatgatgaacagggtgacgagggtggcgatcctttgccgggtttccgagggggagatcgccacggccggcgcggccgccgctcccttcttcccttccgaccgcaggtcggccggggccagcctcgcccgtccgagggcgaacgtcaacgaggcgatcagcagcccgccggcgcaaacccagaagttgatgttgtaattgttccaggtcaccccgacgaacgtggcgatgaggggggcgacggccgccccgatgttgacggccatgtaaaaaatgttgaagccggcgtccttgagctccggtttcccggcatacaaattgccgaccatcaccgccatgttgaccttgaagatgccggttcccacgccgatcaagaacaagccgccgtagaacgtcgccgtgttcgcggccgaggagacagccagaccgacgaatcccgcggccatgagcagggtgccggcctgaacggtcgagcggcggccgaacacccggtcgccgagccagccgccgaggaggggaacgaaatagcacaaggccaggaacagcccgtagatggtgcccttccgggaatcgctccagccgagggtcttgtccatgtagagaacgaggacggccataagcgtgtagaaaccgacccgctcccaaatctcggtcaggaaaagaacgcccaggctcttcggatggtttttcagcatgagatccgcctttcgtcggagattatttcttcggcgccggcttcgtctcgacccagttttcgaggaaccggccggttcccgggcccgccgcctgttcctccagaagcgaggcaaggatcgctttcatatgggcgtcgggcagggttccgatgatcatccggccgttgatgatcagggtcggcgtcgaacggatgccgtgactgtatcgatcggacgtcttttcatactcggccccggtctcgatgatccgccggatcatgtcccggacggccggatcggtcagggccgcttccagcccgtgacggcgggcgaagtcctcccgccattcgggcttcctggtctcgggatagccggcgaaaatctcctcgtggaaggccgggaagcaggccgggtcgtacgcggcaagatacgacaggtcgcaggccccgggatggagatctttttcgacgaccgcgttgcaggcggcttcgagagggaagaactggaaagcgacattcatctttcccgggaactcggccttcaaccgggagagctgctgatggaggaagaggcagtccgggcagagataatcggcgtactcgacgatccggatgggggcgtcttcccagcgcggcgccgcttgggcgatccagtacggcgaaatgaagctgggatcgccgacgacggccaattcgttgaactgacggacgatgttcgcggcgccgccgcccatttgggctccttttttagccagggtgaattcccggaagccgtaggccccggcggccaggccgatcacggcggcggcggcgattttcaaagacggcgcggcgaacgtccggaaaaatcctccgaggccccggcgctcgctccggatcccgtaccgccagaagagaaagaagctgaagagggaaaacagataatagccgctgcacagcaggcagaggcttttctggatgaagatcgagtaagccaagagggccaggaccccgaacgcgttgagaatcgagaccgccttgttcgtccgctcgaaggaagccgtggggaaaaccgcccccaggacgacgagcataccgacgaagaggccgaaccagcccatcggcacgccgccgaactgggcgatcggggaaaaggccgagctgtcgcagttgaaaaacgcgctgatgtcgcagaaggagccggcccagatcgattcgggaaaattggccgcgtagaaatgacggatcgtcatggccgaggcggtgatcatgccggccccggcgatgaagctccagaatcgcttccacccgcttccggggagagtcaacgaaccggtcatggattgcctcctgtcgtcttgcggcgaaccgggcgtattttaacaaaatcccggaccgatgtcccttgatcagtcaaacgggcgtccgccggaggccgcgccggcctcgattccgcggggaccgtcgcgactccttgaccggcggtttcttcacgccttgaggaatacgcgatcgacggaaatcgccgccttcttcagggcttccggcttccttgaagaaaacctgaatcgcggatccgatgaagccgcgacagataaaatcacggcacgggaggaggaggcgggcgccgcagcggaacggtccttgagaaatcgccccgttctctctataatcgggtccctcccccggcggaaagcggaaacgccgcgggaaagaaattccaaaacagcgggccgtccgcggctcccggaggaaccgatggctcccatgacgaacgacgccgtcctcgatctgttcaagaaatccgacgccctgctccagggccatttcaaactcacgtcgggcaagcactcggaatggtatttcgagaagatccggctgatcgagaagccggccgccctcgaccggatcgtcgacctgctggtcgaaaaaatcaaagccgaggggaaggagttcgactatgtcgtctcccccgcctacggggccatcgccatcggcttcctggccgccctcaagctcgaaaaaaaattcgccttcacccagcgggtcgaggaaaagatgtcgttccgatccggcttttccgggatcgacggcgcccgggcggtcatcatcgaggacatcttgacgaccggcgggtccatccaggaagtcgtcgcctgcctcaaggagcggaacacggcgatcgagggcatctacgtcctggtcgaccggaccggcggagccgtctccctcgaaggccggcccgtcggcgcgctcctagccctcaagatcgaagccttcgagccggaggcctgcccgttctgcaaaagcggcgtccccctcgtcaaacccggggcctcggacaaaaaatagggacgggaggcaagccccccgcgcccccttcggacttacttttcagccttcccgccgggattcatcaagcggtcgacaatgatttcggccatgaggttgacgccgatggggatggccgcctcgtcggcgatgaacgtcggagaatgaaccgccgtggcttcccggccggcgggaaccacgccgaggttgaacatcaccgccggggcgatcgttccgaaggcgctgaaatcctccccgcccatctcgggcttctgctcgacgagggcctcctttgatccgagcacgcgctcggcgatcgtcaatgcccgggccgtcagggccgggtcgttgtacaccgaggccgtgccgaatccatagtcgagggtgaagaccgccccggccgcctcgcagatgttcgtgatgagacgggtgatcttctcccggagaatccggcgctggtcctccccgtaattgcggacggtggcctcgagcttggccgactcgggaatgatgttggccgcggtgccggcatggaaggagccgaccgtgatgaccgtgttgttgtgaacgttcagctcccgggagatcaggacctggagggcggtgacgatctcggctccgacgacgatgggatccacgcagagccaggggctggccccgtggcagccctccgagaggatttccaggctgaagccgtcgacattggccgacatgaatccggaggtgtatccgatccggccggccttgagcgtgtcgtcgacgtgataggcgtaaaacgcttcgggaacgagatcccgaaacgccccgtcccggatcatgagagcggctccgccgacggtttcctcggccggctgggcaatgaaaacgaccgtgccgggaagatcggccttgacggccgaaaggacggcggcgacaccgaggaggatcgtcgtgtggatgtcgtggccgcaagcgtgcatcaggcccgtttcccggccgtcgacgactgctttttcccgggaggcgaagggaagatccgtctcctccgtcagggggagggcgtccatgtcgccgcgcagggccgcgaccggaccgggtttccctcccttgaggatcccgatgacgcccgtcgtcgcgaatcccgtccggacctcgaggccgagcttgcggaaggaatcggcgaccagggccgaggtgcggaattcctggaggcccaactcgggatgggcatggatgtcccggcggaggtcgatgagcccgggcgtgagggcttccgtgatctccttgattttcttctcgagcgagggcgccggtcgggccgcggccgccggtccggccgcggtcaaaacgaggacgaggaaggccgccgggacgaaaacggcgcggcgcttcatggattccccgctcaatccgtcaggccccggtttttaagcaggggctcgatccggggctcgcggccgcggaaatcaacaaacatcttcatgaagtcggccgtcccgttgcgggccaggacgttccggcggaaggactcggccgtggccttgtcgaacaggctcgtttccttgaaggcctcgaaggcgtcggcgtccaagaccccggaccagatgtagccgtaatagccggccgcgtaccccccgatgatgtgcgtgaaataggtgctccggtagcggctggtgatttccgggatcaatccgatcgaatcgaagtacgccttctcgaaggcgttgatgtcgaggtcgaccggttcggtcaaggtatgaatcttcatgtccaggagggaggcggccaggtactcgacgttatcgaagccctggttgaacaagcggctgttggagatcttggcgaccagggcgtcggggatggcctcccccgtctggaaatgcttggcgtaatgcttgacgaccgtgggatgggcggcccagtgctccatgatctgggacggaagctcggagaagtccggagaccggaaggtggttccggtggtgatgtcggacaagaggttgttcagggcgtgcccgaactcgtggaacagcgtctccacctcctccagggtcaacagggccggacggcctcccgagggcacggaaaaattcatgaccatggtcacgacgggatcgacgtccttgccgaagattcggttctggctgcggtacgttccgcaccaggctccgccgttcttgcccgcccgggggtggaaatccaggtaaagaacgccgcacggcgagccgtccgcctccttgacctcgaaggcctgggcgtcggggtggggccgcgggatgtccggaagcggagtgaaggtcaggccgtagagctggctggccgtccagaacgcgccgtcccggacgttgtccaggacgaagtagggccggagctcggcatcgtcgaggtcataacgttccttccggagcttttcggcgtagtaccaccagtcccacggagccagcttgaatccgccgttttcccggtcgatgatcccttgaagcaggccggcttccttcttggcgaccttgagggccgccgcccacagccggttgaggaggtcatagacgttttgcgggttcttggccatccgcgtttccaggacgtaatcggcgtaagtcttgtatccaagaagaccggcgcgctcgacccggagcttgatgatgtcggacaggattttcttgttgtcgtactcgttgtcgttatccccgcgcttgatgtaggcggtgtagatcttttcccgcagggcgcggttttgggcgaacgtcaggaaggggatcatgctcggcttctgggttgtgaagagccagcggccttccaggccggccgccttggccgcctcggccgcggccgccagggacgattccggcagaccggccagatcggcctccttgtccacgaccagccggaaggcattggtctcgttcaggacattctggttgtattggacgctcagccgggacagcttctggttgatctcccggagcgccgcccggccggcctcgtcgaggccggcgccgttgcggatgtaggacttgtacaggttctccaggacgaaggtccgctcggcgtcgagtccgagggacgctctcttctcatacaccgccttgatccgctcgaacagctttttgttgaggttgatttcgtcccggtgggcggccaagcggggggagatctccttctggatggccttgagctcgtcattcgtgtcggccgaggccaatccgccgaacacccggttgaccgcggtaagccgcttgtccgaccggtccagggcggcgatcgtgttttcgtaatcgggcggagccggatcggcgacgatcgccgcgaccgccgcttgttgctcggccatgcccttttcaaacgccggaagaaaatgctccggcttgatccggtcgaacggggggacctggaacggcgtgtcgaagtcggcgaaaaacggattgccggacgccccggaaacgggcggccgggacgaggcggcgatgagggccgctcccgccaggacgacgatcccggcgagaagccgcgcgccgagcggagaggacgagctgatcatgggtgatctcccttcatgacggacggtgatttattcaaaggagaaaaatgatacgtcccgccgagcggatgtgtcaaggaaacgagccggccggagcggctcggagccgggcgggaggagaaaacccgggaactcatcctatcccaagaaaggagaagacctgggcttccctccggagattcgacgggagaacgtctccctcgggccggcgtgaatcatcagaggtcttctcattcgaaaccgggacgaaaacgggaccttattgacagcccggccgggcttttctatattgggctcgcggtttttccgaatcccatgccaaggtggaatcatgcgccttttaatcctcaaccccggatcgacttcgacgaaaatcgccgtctacgaaggcgaccgggaaatcttctccgaaaacatcgcccactcggcggaacaggtgggccggtataagcggatggtcgaccaaaaagactttcgcaaggaaatcatcctgaaaaccttggccggccgcgggatcgatcccaagagcttcgccgcggtcatcggccgcggggggctgctcaagccgattccgagcgggacctacgaggtcaacgtccggttgatcgaggatcttgcggccgggatccaaggggagcacgccagcaacctgggcgggctcctagccgatgagatcgcccggccgctgggccttcccgcttatatcgtcgatccggtcgttgtcgacgagctcgccggctgggcccgcctgaccggattttccgaaatcaagcgccggagcatcttccacgccctcaatcataaatattcggcccggctggcggccgaggccttgggccggccgtatgaagacctcaacttgatcgtcggccatctcggcggcgggatctcgatcggagttcacgaccacggccgggtcatcgacgtcaacaacgcccttaacggcgaggggccgatcgccccggagcgggccggaacgatgccggccgccgacctggccgctctctgcttttccggccggttcacccttgacgaaatcaagaaaaagatcgccggcaagggcggaatggtcgcccacttggggaccaacgacctccgcgccgtggaaaaaagaatcgaggagggcgacgcctcggccgccctggtcttcgaggctatggcgaaaaccacggcgaagcagatcggcggcgcggccgccgttttcaagggcaaggtcgacggcgtcgttttgaccggcggcctcatgcacagcgccaagttcgtcgagctgatccgatcgcacatttccttcctcggtcccgttttcgtctaccccggcgaaaacgagatggccgccttggccgccgccggcggccggatcctgagaggcgaggagccggcgaaaacatacaactgaaacgtccgcacggaggaactcacgatgatcacatcgctcgctcaaatcgtcaaacacatcaaaggccagaaaccgcggcggctggccgtcgcctgcggcgaggatcctcatacgatcgaggccgtcggccgggccgtcgccgaaggcctggtccaggccgtcctgaccggcaaccggtcgaaaatcgaaagcgtcgcccgggacaacaagatcgacccggcctcgttcgagatcgtcgacgagccggatccggggaaggccttggcccgggccgtcgcccggatcaaggccggtgaatccgatttcctgatgaaagggctgatcgactcctccctttacatcaaggccatcatcgacaaggaaaaagggcttctcgccccgggcaagcttctgtcccatgtcagcgtcatccaggtgccgtcgcgacggaagctcatcgtctgcgccgatgcggccgtcatcccttatcccgacctggaagcgaaagtccagatcctgaactattgcctggcggtcgcccggaagctcgggatcgaccggcccaaggccgcgatcatctgcgccgtggaaaaagtgaatccgaaaatggtcccgaccaccgacgccgcgatcctcagcaagatggccgatcgcggccagatcaaggacgccgacgtcgacggcccgctggctctcgacgtcgccctgtccgccgaaagcgccgagatcaagggtgtccgctcgccgatcgccggggaagccgacgtcctgctctttccgagcatcgagacgggcaacgtctttttcaaggcctgctcctacctggccggaggggagacggcggccgtcgtggccggcacggattgcccctgcgttttgacatcccggtcggattccgaggattcgaaattctattcgatcgccctgggcgccctcatctcctgacgcacagccgccgagctgcgttctcgtccttgacagcccgccgctttttaattattttcagggggaatcgacgggatcgcgggaaagagcggttttaaccgcctctctttcccggaaaggaaggggatcgcatgaacatcgtctggacggcgcttctgggtttggccgccggattcgtggccaagctgatctttcccggcaaggaaaacatgggaatcctcgtgacgatgctgttgggtatcgccggctcgttcctcgcctcctacggcggccagtggctcaaaatctaccagcccggggaatcggccggcttcatcggctccgtcgtcggcgccctggtgatcctgttcatctacgggctgatcagaaagcgcaaggcatagggccgttttttccggcggctcccaacggccgggccggccgccgacgcggctgattccgggatggcggccggtgcgggaatccccgcgatcggcgggattccgaaacggcggcgtcggcccggcgcgtccccccgcttcttgagaaaaatctgggccgcggggcggagggggggccggtcacggcatccggaacctccgcgcgcgtttcgagagaccgttccccggccgggaatcacgctcttcgaaaaaacggccgggcgggagagaaggacaatcgccggttttgacatcgccttcggggatgcattatgcttcggccgatggacgacgcgaaagcggcggggcggttcgatggagacgcaagccggcctcccgggcgcctgttcgaacccgttgacctttttttccttttcctgtttctggccgccctgctttttctcttccgcggatttttcttccagggcggcgttttcttcgagcgggacggtgccgttctcgagattcccgcccgccggctggccgttcaactcctccgcgaaggcaacttcgccctctggacggatgtccacggcaacggccagccgttcctggccaatcccaagaacgcggtctgttatccgggaacctggctctatctcatcctgccctttttcaccgccttccgttttcattacttgatccatgccttgatcggctggacgggaatgtacgggcttcagcggttcttccgcctccgccggccgtcggcctttctgggcgcctcgcttttcttcttcagcggccttttcctttcgagctttgaattctacaatcatgtcgccgctttcgcctggatgccctggatcttgatcctctccttttcggattcccttccgcgattcaaaaaaacggcttttctggggattctttgggccctccagctcctcgccggaacgccggaagcggtcgtgatcactctcatcctcgccctcggccagtcgttttttctccccggcaaggccggaaagcgggccgcagtcgtcctggcctccctcgttctgggcgccctgctttcggccgtccagtatctcccctccctggaaatcttgggacggaccgagcggacggccgcagaaacgtccctctggccgctggagttgatccagttgctcaacgtccccttccccgggatcctgggatcggaccggggggcggggacgtctgatttttgggcagcccatctcttcgacaagggcgcgccgctttattacagcttctatctcggaagcgccgggcttctcctggccgcgttcggactcgcggtcaaaacgaaccgggccgggcggggccggagatggctgtttttaatttttcttctcctggccagcggccggtatttccccttgaacgagcttctcgtccgcgttccctttctttcttcgatccgctacccggtgaaatacatgaccggggcgatgttcgtcgcggctttcgccgccggagtgtttttcgacgattatttcgtccgccgccgggtcgaggcgaggcgccttcggggcggatggatcgcggccctgggaataacggccgctttgaccgccctcgtccccgtcttaagccgggtcctgggacgcctcttcgtcctccgcgacgagcggctcctcgccgcggtccgcggttccttttatgcgggcttggccgctctgtcggcggctctcgtcctgatgggcgccttcagcctggggaaaaagaaatcggggatcttcgccgccttgtttctcctcctcgccgtggccgatccgctgatccggaacagttccatcaatcccgtcgtccccgaatccttctatgatccggccgccatcctcgccgaaacggggcgcccggtgaccgtgtaccgccaggaagtcctgcccgacgacatgagaatcaagctcggcggccggagagcccaaagcttcatccgccagagcctctacccgttttccgggatgagcgacggcgtccgctacgttttcaaccgcgatttcttcggcctccacccgaaggagcaaggggagctgaggacggcggcggccggctggtccgaggatctcctgctcaaacatctccggtcgatcggctgcgcgtatctcgtcgggccgcggccgttgcggggactgccggcggagaagcagatcttcgagggaatccccctcgccgtccagaagctcgggccggccgcctcgtttccgtatttcgtcggaagggcggtcgtcgcgaaaacgccggccgaaaaaaaagaggccttcgcggccgaagatttcgacccggccgacgcggccgtcgtcgatcgtccggttcccggcctggacggaccggccgcggctcaagccgccgaagcccaagccgtcctcgaaatccagggccgttccgtccaccggatgaaaacgcccgccccggtgatcgccgttttccgcggaaattgggacccgggctggaaaggccgcctcgacgggaagcccgtcccggttttccccgtcaacctcgggctcaagggagtcgtcatcccggcgggcgctcacgaagtggaaatccgttatctcccggcaagcgttctcgccggggcggccgtcagcggcctgacgattctggccctggccgcggcgggcgcggttttccggcgccgctcggcccggcctggacggccagggagaacagcggcttgatcaaaacacccaaaaaactcccgctcacatcaccggtttgaagatgacggagaaggcggatgacgctttccccgaggagagccaggccgaacaggaaccggacgagcgtccaccaggcgaatcctccggccccgatccgaaccatatcaagggcgacgatcgaaaacgaaagcagaaggttgaaggcgatcgagccgcggacccaaagccgggtcttggtccggccatagaaggccgccgcttcctggtccgcccgcggcaggaaaccccagagcggcgccagcgcatacgcccggtcggcggcgatgttgcgctcgcgctccagaaccgcgtccgtttccggaaatcccgagccgcctttccggaagacataccggaaacgacggccctcggccgcggaccggataagcaggaaggaatcgccgccgcaggtgatccccccggctttcagccaccaggccttgggcgtcggcgagaggacctcgagaacgtcgccggcgggcaggaactcgtcactcatcacgtcgtccctcggccccttgtcgaagcggagacccaaaagggacaaggggaggcttccgaccgcttcccccgaagagaggttgatcacgaaccggacaattccctcgatcgcgccggccagggcgaaaaatcccaagcctgagggaatgaccggtccgaaccgcccgcccggggttccgaagatctggaggaagaagagaaaagccggcggcccggcggccagcgtttccaggagggctgaatagagcgtcgcccgccccgggtcgaattcgagggtttgagccaagcgttcctgaaaaggacgggggagaaatcccaacagagcctggccgcccaaagccaggttttttttgcgcgtccggatccgttccctccggaggccggccaggaagtctttctcggctgcgtccccccactcgacgacgatgcgcgtgacgttgcccgccttccatggctccagcccgtagatccattctcggccggcggagcatgtttcggtcatcacctcgaacagatcttctccgatccggaccgccgtccctggatgaggagccgtccggggggagccttcgacccggggcctcatctccggatggggatgaggaaggcggatctcacggatgttcgatttcatcggaatgccgaaagacactatatccccggctttcgcggggtgtcaacgagcggccccgatccggacggccgggggggatcaaaccgcggaacggcttccggccgcgaaggttggacggccggaagccgcccgcttatcggaacaagggaaggctccgggagcctccccggcggcctttacatccggttgacccggatcgatccgttggtcgtttcgagctcgatggaggggccgcctccgccgatttgaccctcgatccggtggcgggaagaaatcgtgcccttgatggtgacgggaaagtcgacggtgatcgatccgttcgtcgaccgggcccgaaagtcggcgttgacctcgccgcccaggcgcaggttgaccgagccgttggtcgtgtccgcccggatatcgcttctcacctcgtccagctccaagtaaatcgagccgttggtcgtgtcggccgaaaccgatccccggaggttgcgggcgcggatggtcccgttggtcgtcgccaggacgatccggccgtccccgccctccatccggatgtcgccgttggtcgtgccggctttgacatcgccgaagccgcccgaaagctcaatgtcgccgttggttgagcggatcgtctcgaggatgaccccggcggggaccttcacctcgtaattcaccttcactcgaacattgcggaaccgctcataaaccgtgtccacccggacgtccgagccgggggtttcgacctcgatcctcacccggtccaagtcgtctttccggcgggaggcgattttctgggccgtaatctcgacttcgttccggtcccaagtcgtcacccggacatacccgttcgtgtttttcaaggcgaatcggtctcccgcctttaggggaagggttttcgagaacgattcggtgtgcttcgatccatcgaaaaaatcgtcgaagccgccgtccataaaatcacaggcggcgccggcggcgacggtgatcgccaggaatacgcccgccaggccggcggcgaattttgattgtccgctcatgttcgatcctcctccgagacgttcaccggaaaagacgcatttcgggtgaaaaaggttccccggggagaaaactcagattttctgggcgggaagatcgaagtccgtcagcgattcctggggaatcccaaaatggttcccttgaaggtaatggacgccgcagccggtcaagaacttggcgatttccggccggtcgacatgctcggcgacgaccttgatgccgttggaccggcaatactcgaccacgatccggatcaggtgcttggccttttcgtcgtggaggcacttccgggtcaagctgccgtcgatcttcaggatgtccatcgggagctggatcaagcggctgagattggaatatcccgctccgaagtcgtcgatggcgatcttgcagccgttggcccgggcccgctcgaggaacgaccggcaggcctcgttctcgaccagctcttcccgctcgatgacctcaagaatcagccgcttgttcaaggccggagcgtccttgagataagcaaagagggatttctcgaactccggcatcaagagatccttgaacgtcacgttcagggaaacgtcgcagggcgtcttctgcagggccgtaaaggcctccttcaacatgaactcggtgatgtccgaatcgaggccggtcgaggtggccagggggaggaaagggctgggcgagacgtaaaagccgtcctggtcgcgcagccggaggaggctttcaaaccagaccacttccccggtgcgggtatcgatgatcggctgaaaataagcccggcatgtcttcccctcgagattccgggtcagggtgctgtacaacttcagggaatcataagccgaatcccggacgctctcgtcgcccttgtaaagggaaacggcccggtgggagcggatgccgtccttgagggccaagtcggccttggacaggaaatcgaccggggacgcgtcgttgacgaacgaggccccgagcttaatgttcaaatggatgttcagcctgccccaggccatgaattcgcggcggagggcggtgcagatccggttgagcagggcttcggccgccgcccggtccatcgattcgcgggggatcaggaggccgaaatcgttgccgcgcagccgatataaagaatagttgaactcccggctccattgctggagatagcgggaaatgaactggaggatctcgtccagcgtttcgtagccgaagatcgtccccagctcgccgaagttttcaatatggacgatggcgaacaagaactgccgatctttcgggatggaatggatcaacacctcgcggttcggcaggttggtggccttgtcgtagctcagctggcgaaccagctgatcgatgaatttttctttctgccgctcgttcatgaagctgaaaacgaacatcaggctgaaaatgacgaaggcgacgatgatctgccggatggtcaaatcgatgttccagggcccgaaaaacccgaacgtgttcagaacgaacgtcaacaggatcgtcaggaggaagacgcccgtccagagagttccccggcgggcgccggtcagatggaggacgatgggcggaaaacagaaaaagatgatgaggtaaaggtcgcgggaaggaggaatgaaagcggccaggacgaatccggccataagcagaaggacggccggggtcgccagccggaacgtccgccccgtcctgaggaaagaaatcagcagcccgagggagacggcgagccagatcccgtaatagacgaggtaggcggtgtttccccgtctcagatcgagcaaaagataaacgaacgcggcgatcgcggccgccgacaatccggtcagaagaagctggcgtaggaaccgttcatgaatcccctcaatcgcctggtaccagccggtgtcctggaaccggaacccttccggcagcctttcccggagtttattggaaagcatccctcgtcccgctccgcttgattgcaccccgtttttccgttctccgccggtccctttcccgaggaccggaagcgatcattatacaatcgaatccggattagccaaaggaattttttcatgcctggacggattttttttcgatccggtgaaggcaccgccgcaccccggcataccaccggaccggaggatgcgcttccttccggatcgtcaagaaaaaccaggcgatgaacaccggaaaaccagcgaggaaatcgagaaaatcccaatagaaggagacgttgaaaagaaagaggacggcgccctccaatgggcgcttccgtcggccggccgcgaaaagattgtgaaaattcaggccgcggttatgaagaaaaggaccgcccggccgagaaattcaaggaaaacaacgcgttccaggaggaaaacgaagacggtgacgagggtatcgggcaatccccgcgcggaagaccggacgttcgggctttaatccaatcgattaaaagcggacgggtaaacggattatttaaggacaggccggtttgcgttgttgacaacatccggaaggccgatagaataatgaacacatgcctgccgcgcgtcccggggaaacgaaaagccgaaggtccacggtcccgactgcccgcggggcggccctcgggggcggactggccctcttcgccgtctttttcggcctgacccggactttctccgggctccaagtgggctttcatcctcccttcacggcttcttccccgggggagctgaccttctggctgggctttgtcctgctcctcgtcccgggcgccgttctcctcggctacggcctgagcccggccttcgctccgcctcttgaaaaagcctggttccgcctccggtccctaagccggagtcagcgtctctgggctcttgttctccttttcgtcctggccgcgctttcggcccggatgagccaccggctgatcctccgcgacctccccttcaccgacgacgagtacgcgacccggttcggcggccaggtcctcgcctcgggccgggtcgcggtcccggaacccgagccgttcgccgcgtactccaacctgtttcttttccgccgcggcgggaaggtcacgagcgtggactggcccggccccgtcgcggcttgggccgtctcggaggcgacccggaccggtccgctcgtcttcgccctggccgcggccgccgccgcggccgcggtcgccgcgacatgcaccgtcctcttctcgccggcccacggcctggctgcctttctcctgttctttctctcgcccatggccttcctcctgtccgcgacgacccacgcccacttgctgtcgcgggcaggtatcgccctcgccatcctcggcttcgtcctggcccggaggaagccgtcgcccggccgatgggcggcggtcggctttttcgccgccgtcgccttcacctgccggcccgtcgaggcgtccgcccttctcgcccccctcgtcgtcgatttcgcggccggagcgctccggaaacgggggtcggaccgggcggctctgggctttttcgctctcggcgccgctcttcccctcgccctgttcttcctctacaacgggctggtgaccggaaatcccgcgctcccgccccggttcttcatggaaggccccggcgagacgatctccggggaatcgatcggccatcggttcggggccaacacgggctacaacctcctgatgctcgcgatctggtttctcggcccggcgggaatcgcggccttcgctttcggcgtcggccggagccgcctgaaccgccttctcggcctcggcgtcggcctcaacctcctggccgggctgctccacgacaatcagggcctccacgccgtcggcccgattcattactccgaatgcgccgtccccctggcgatcatcgtcctgtccggcctggcggcgatcaaaagccgtctcgcccgggcggggcttcctccgcccgtcttcgcggccgccgtttcgggcctcctccttttcggcatgggaaccttcatcgcctggcaggcgggggccttgaacgcccaggcccgcattcaaagcgaaatctacgacgggatcgaacgggccgtcgagacccggggagggcccccggccgtcgtcattgccccgcggttcgccgacgtctggcgggcgaacccggaatccctaaagagaggaacctgggttttcgagtggcggcgggcccggcccgacctgtccgacgacatcttgatcgtccaggacgttcccggggcggcttggattttccgggaaaagttcccggaccggaatctctttcggatgaccctggccgccgaaccgccgtactggtcccttgaaccggcgaagccgtgaggctgctaccggggaagggacacccggtagatcagccgccgaatccaggcgttggcgacggcccggatccttccccgccggaggtcgccggtcgaaagcccggactgaggatcccctcccagccggtcgaggaagtccctgaagtcccggctctgggtcgacttgatccgcgtgctcgtggccgtccgggacacccggaaggaacagagcggttcgcggatcacggccagccggccgtgacggaggaggcggacccagtagtccaggtcgatgacgtaaaggttcgaggcgttgaaaacgccggtccgggcgatgaggtcggcccgcatcaggaccgcggccggctcgccgatcaggttcgtccccgcccggaccgagcggcggatggcttcccctccctggaccgtctcctcttttccggggaaagcccggcgcatgagcttccgcccccgctcatcgatgatgtcccgggcgcagcagacgagggcgacgccgcttgaggagaggtccccaaaggcggccgtctgacgttccaggcaccgggagtagaggaggtcgtcccccggcaggatcttgacaaaccggccccccgcctccttcaaggctttgttccagttgccctcatgacccaggttccgttcgttctcgacgaggcggatccggggatcggaatgggagcggacaatcgccgcggtcccgtcggacgagcggtcgtcgacgacgaccagctcgaagtcgcctagggtttggccgaggacggagcggatcacggcgtcgatggtgcggctgttgttgtaggccgggacgcagacggagacgagcggcggattcatgtccgccctctatttatcacagaaaaaatcgtggagacaagggccggtgatcccccgatttcgtttgacaggatttttccctttgattaggcttagcccgtgagataccgcgaagccgttttcgcctggttcggttttcgggccggagcggccggcttcctccgccacggattcaccccgggcttccgagcggccgcctcggccctcctccagccggtcaacagctatacccggtttcccgaatatcacttcttcgaacgggacatcgccgacttcctcgaagaccggcctggcggcggggttcctcccctcgttctggatgtcggaagtccaaagctgttcggcttctatctagcccgcaggcacccggttgaccttcttctgacggacatcagcccgctcgccctcgacccttatgaaaaagcctgggaggcgatccggcggggagcccgtgggcgcgtttccttcgggatccgcgacgcccgccgcctttccgaccgggacgggacgtttgacgtcgtctatgccatgagcgtcctcgagcacgtcgagggcgatgacggagattccgccgcggccggtgaaatgctccgggtgctcaaaccggggggcttgctggtcttcagcgtccccatcggcccggactaccgggaacaggcgatccagggcctcgcccacgccgtcgagcggacggggaaaggcgacctccacttctttcaacggatttacgactccgggcagttcgagaaccgtctccgccggccgcttggcggccggatcgaacgcgaaaagatccggacaatcgaccgccggccgtcggacgttctccggggctatcattttttccggagatacctgccggaagggctcgcggccgccctcggcccgctcaatccggttgcaagcgccgcgttcaatcgggaccatcccgggctcgtcgagcccgccgtcacggtttatgggccggtccatcgcttcggcgacatctacgccgacgcgatcctctccggccggaaggcggcggaaccatgaaaatcctcctggtcaacccctaccccaaggaccgtccgccggtcgcgccttggccccacctcggcctggttctgttggcggccggggcacgggccgccggccacgaggtccgggtcgcggattacgcgtactcccccaaggccccgcccgtcgcctcctggatcgccggttttacgcccgacctgtgcggcctgacgctctacacggcccacatgagccatgcccggaaaaccatcgccgaaatccgccggttgacgcccgtcccgatcgtgctcgggggcccccatgcttcccttcacgccgagagcctggccggagagcgtctcggggactggattttccggggcgaatgcgatcgggctttcgttgaggagctgccccggattcgccggggaaccgaaacccgggtcgtttcggccgagccgcccgacctcgccgcgacgccggcgcccgatttcggcccggccttcggctccgaatcgatgatgtcgtaccccgtccagctgtcccgcggctgccccttttcctgctcgttctgctcggttcggttcctgtcgacgcggaagatccgcacccgcggcctcgaggcggccctggacgagatcgccggggcggtccggacccggccccggctccgggaaatccggatcgtcgacgactgcccgacctacgacctggaacggttcaaagagttcctccgcctttaccgggaccgccgcttcggccttcccctgcacatcgacaacctcagagcggaccgcctcgacgaggagatgcttgacctgctcaaggcgatcggcgtcgatcacgtctgcatcggcgtcgaaagcggcaaccgggccgtcttcgaggcaattcacaagggcgagacgctcgacgaaatcgtcgaggcggcccgcctggtccgcgcccggggcctccggctctatgtttgcttcatcatcggcctgcccggagccacggccgccgccgagcgcgattccatccggctggcccgggcgctcaagccggactggatttattggaacctctttcaaccccaccgcgggacggacgcccgggcttggttcgaacgtcacgggcgagtcctgttcgaggaggacacgagcagtttgatgggcttggatctcgccgtaaccgaggccccctgcgacacgccggaattcccggccggggagcgggtccgcatccacttgaccgccgccctcgagtccggggcctattggctcaatccgctgttctttccgaggcacctgaagctcgtcgccgcgtacggcctgggacggtcgtttttcgtggggttgccggcggccctgcggatcaatttcaagatgcttctccacaaggcccggcgtccggtccgccggcgggtggagggcgccgcatgagaatcgccgtcatcgtctcaaccttccctccctatcggggcgggatgggaaatatggcccgctcctacgccgacgggctgtcccgccttggacacgacgtcacggtcttctgcccggcctaccggccggcggagaaggaaccggacgccccctaccgggtccggcggatgaagcccccggtgaaattccgaaacagcgcctttctcccgcagctcgggccggagacacgcggcttcgacctcgtcaaccttcattaccccttcttcggcggggccgaggccgtccttctcaacaagaagacgctcggccggcggatgccgcttgtcgtcaactaccagatggatcccctggccggaggctgggccggcgcggcgatggccgcctacacgaagaccgtccttcccgccgtgctgaaagcggccgaccgggtgatcgtgacctccctcgattacgcggcccattcggccgcggccccggccctccgccggcatccggaaaaattcgaggccgtcccgcccggcgtcgacacgtccgtctttaaaccccggccgatcgacccggcgctccgggctcggtacaagctcgggccgcgggaccgggtcgtgctctttgtcggaggcctggaccgggcccacgccttcaagggcgtcggcttcctgctcgaaacctgggccgcggcgaagcccgggaacgcccggctcctcgtcgtggggcgcggcgacctccggaaccgctacgttcaggcggccgcggatttggggatcgctccggacgtgatcttcgacgacggcgtcggcgaagacggcctgcccgccgtctacaacctggctgacctattcgtcctgccctccctcgaccggtcggaagccatcgggatcgtccagatcgaagccctttcgtccggcgtccccctcctggcctcggccctgcccggcgtccggaccgtcgtcgaaaacggccggaccggcttcaccttcgaggtcgggaaccgggccggcctcgcggcccggctgaaggccgtcctcgaagacgagccgctccgccggcggatgtcggccgccgcccgggaggccgccctggcgaaatacgagcaaggagccgtctgggccgcggtcgaaagaacattcaagcgggcggcggaaggacggtcctcatgaacgcggatcgaacaaccgggcgcccggtccttcgcctcgcggcgatgacggtcatcggcatcgcctccctggtcatcctccaccggctgggatatctcgacctggccccggtaggctcgggcttccgccggggaggaccgtggatcggcctcatcgtcctggctctcatcggcctcctggccgcaagcgcggtccgcttccaccgcctgacgcgagctttcgggatcccggtccggttccgggacgcggcggccgcgaatctgatcggccaggccgtgggccagtggctgcccggctctctggccttgaccgaggttctccggtttggggtgatggccgggacgtccgcgggcccgggaacccgggggcgtctcgggctggccgtcgcggtcgatcggattctcggcctgggagccatgttcgccgccggaggactggccgggttcgtccttttcgccctcggtaaaatcggccggggatccgccgtggccgttttcgccctttcggcagcggccgtcgttctcggcctggccgcgctggccgctcccttccgcccgaatcgcaggctcgcgcgcctcgcgcaacgggcggcggggccggatccggcctcctccggactgtttcgccgggcgggccggggcgccctccggcttctcaaaacgctggaggaattccgggccgggaggcacagggctttcggcctcctccttctcagcctggccgccgcattgttcaatcccctgacgctttttttcgccgcccgagcgacgggattccctcttccgttctccgtcatcctggcggccgtcccgctgaccgcggccgcgatcctgctccccaccggcctggccgggttcggggggccccagcttcttgccgccggggttttcgccctgttcggcgccgaaccggcggcggtcgtggcggcttgccttctccagaacaccgtcgtcttagcaggacagactctcggaggagccctcggctgggccctcctgtcccgacgcccgtccttcaaaccggggaggttgcaatgaatccacgaaagatcgtttcggtgatcgttcccgtcttttccgaggaaaaagtcatccccgagttctaccgccggacgaaacgcgtcctggacgggctcgccggccgatacgaccacgaaattttgttcatcgacgacggcagccgggacgggtcggccgcccttctccgggacctctgccggaacgacacacgggtcaaggccgtcttcctgtcccggaacttcggccatcagttcgccatcaccgcgggcttggatcacgtccgcggggacgccgcggtcatcatcgacggcgatctgcaggatccgccggaagtcattccggcgatgatcaaaaagtgggaggaagggaacaaggtcgttttcggcgtccgggaaaaacgcagaggggagaacgtcttcaagctcctgacggccaaggtcttctaccgcctgattcgcctgctgagcgacatccggatgccggtcgatgccggcgatttccgtctcctggaccgccgagtggtcgaggcgctgcggaacgttcgggaggagaaccgctatctccgcggactcgtgagctggaccggattcgcccaagtcgggatttcctaccggcgcgacccccgctacgcgggcaagacgaagttcaccctgaagaaaatggtccggttcgccttcgacgggatcctgagtttttcggacaaacccttgaagatcaccgcctatctcggtttcctgatcaccctggcctcgttcctcatggccgggcgagtcctcatcgggaagatccgccatcccgaggttctggtctccggatggacgtccctcatcctggccgtcctattcatcggcggcatccagatgatctcactcggaatcttgggcctttacctcggccgccagtaccgggaggtcaaaaagaggcccctgtatatcgtggccgatacggccaatctcggggaggacggagccgaggccggcccccgggataaagcggccccggcgtcatgaacgcgtccgcttcccttgtcttcgcccgggccctgtgctatcttttttccggatcgacccccccatgaccaaacgtctctcctcgttcgccgttccggccgccctccttcttctgatctccggcgccgccggccaggtccggctcctggatgttccctatgttccgaccaagttcccggtcgtcgacgaaatgctgagcatggccggagtgagcaagaacgacatcgtctacgacttgggatgcggggacgggaggatcgtgatcggggctgcccagaaatacggcgcccgggggatcggcatcgatcttgatccggaacgcattctggaaagcgaagccaacgcctccagcgccggcgtcgccgatcgggtcaggttctacaccggcgacttattcgaagccgatatccgcgaagcgacggtcgtctccctctacctcctgacttcgatcaacctccggcttcggccgcgcctgctccgggagctgcggccgggatcccgggtcgtttcgcacaatttcgccatggaaaactggaagccggacgcctcctcggaagtggaagtggacggcgtccgccatgacgtgtttctctgggtgatcccggccaacgccagcggcgcctggacctggacgatgaagatcaagggaaaaacaacgaccgtccgggccgatctgatccaaaaatatcagtatgccaagggaacggtgaaaatcggcggaaccgaggcggcgatcgccgacgcgaagatccagggagacctcgtccggttcagattcgaggcggccgtcgccggttccccggcggcctttgtctttgaaggcaagctcgtgggccagtccatcaatgggaccatccgttcggtcgtcgacggggaaacccgggtttggacctggaaggccttccggaatccgaccacggaaaaaccgatcgacgagcctccggacgcgggctaatcgatccggatctcgacgatttcccccagggcggcgattttatccctgaaggtccgggcccgggaggggcgttccgttatgacgaacacgagaacggccccgttcgtttcccggcggaagaagatttcgtcgactttttcgcccgtggcggcggccagcccgcgcaactcgtccaccgcctcgatcccggccacccggagattgtaacggacgatggaccggtgcgggacgaggtgttcgaccagggggaagctcaggagaacgatcgtcaggattccggtgtagatcgcggcgattaagaaatatcccgccccgatgaccagaccgagcccggcgaccgcccacaaggtcgaagccgtggtcaaaccatggacgtgccggtgggcctggatgatcgtcccggccccgatgaagcccatgccggtgatgacgccggaggcgatccgcagggaatcggcagacccgacgggggctccgccgaggatgatgccggaaagggccatcatcatggtggagccggcgcagatgaggatattggtccgtaggccggccggcttctggccgaactccctttccaatccgatcaccccgcccagaacgacggccaggacgagtttcacgatgacgtcgagcatgacggctccttcggaaaacaactgaatttctcccgccgaatcgccggcgtcggctccggcggattcatcctgccatacgtccgcggggctgtcaaacccgtgaatcgatctcaaaaaagccggctctcgtcccatttgcacagaggaaagcggcaagataatgaaagccttcgctcccgcgccggattcatcgcggattttcccgatcggccggcttggcggcggagaatccatgtcctgaaagattcgccccgccgcccgccccggctttttgccggcgcccggcagtctccaacagctgacgccggtctttttcgcgccgatttcccagacaagactcaaggaatggagcatccggatgatgttcgctccggtcgttaaaaacgccaccgccagcccccttcccgtgaagaaaacgcgggaagcttgacatactgtgtttgatatagtattgtctaacgcactatattgttttcgagcgtgtaaaagaaaaaaacgaggcgatcacaatgacggaaacggaactcggaagtctcgaaacggaaatgaaccggggattcctccaaattctcgtcctcgccctcctcgagaaagaccgctacggctactccatgatcaagcacatcgaggggctgggatacaagatcgaggaaaataccctgtatcccctgctccgccggctggagaaaaacggctggatcgccgggcggtggacgctgggggaagaccggccgcgcaagttctacggcatcacggccgaggggcgggcgatgaaagccggccttctcgccgtctggaaaaaccaaaataggattctcgaagaaatcgagaaggagaacgaacatgaccaataatctcgatgcctacctcgaggacatcggccattacctggccgtcggcccggcccgcgaggagatcctctcggaaatccggagccacatcctggaaaaagccgaggaggagcgcgcccggagcggcgaggccgccctcgaaagagtcatcgccgggttcggccctccccgacgggtggccgagcggtacttggaaggccgggagatcatcgccccggcctaccagcgccacctgttccgatacacctccatcctgttcggcttccattttcttttcacccttatcggagtgatcttcggccggagcttcgttctatttcccgttcttttcgtgccccggatgggcgtcatcgaggctctgttgtatctcccggcggcgtttttgaccgatctcgggtttgtcgccctgatcctctacttcgtcacccagagtaaaaaggacatcaagctcccctggccgaaattcgggctcgaggccgatgacatcaagctcccccggaagcccggggccctcgccgcgacgctcgccggcttgacgttcatgctcgccttgacggccgcggcggtctatgttttcacccggcacgggacggtattcatcgccgggttggcgagctcgggggaaatcaagccccttttcacggcggaagccggccggagtttgtcgctgatcgtgatcgcgctgctggcggccggggccgtctccctgtttctcaagctcttcacccggtcccgctggatcgacgtcggttccgacgccgtctccctgatcctgttcggcctgatcctccgccggcccttcgacggcttgttcgccgtcccgatcagcggacaagccttgtcgggaatcagaatcggcctggcggccgccctcctcttcatcgtcctgatgacggcgatcgatctcatcaagaacctggtgatgatcggacgaggggccctggtccgcaggccgccggagcgagggacgccggcctgagcctgttttttcaccgcggccgtccggtgatataatccggcttcaatggagaagaccatgaagaaaccaacctccccccggcgggcgcggaccgcggccctcctcctgcttctcggcggccccatcctccttcactcccagcaggctcccctgaccgaggacgaaaggaacacgatcgaagtggtcaacaaaacgaggaattcggtcgtgtacatcaccaacatccagctcgtccgcgacttctttttcggagccgaggaaaagatcccccgcggcagcggctccggtttcgtctgggaccggcgggggcacatcgtcacgaatttccacgtgatcgaggacggggtggagttccaggtgactctgcccgaccagcagcagcgctcggcccggctcgtcggcaaggacgaatccaaggacatcgccgtgctccggctcgacggcgatgtgtccgagctctccccggtcgtcccgggcacatcccgtgatctcgtcgtcgggcagaagacgatcgccatcggcaatccgttcggcttcgactataccgtgaccaagggcatcgtcagcgccctgggccggaaaatcaccggcgccggcggcgtgtccatccgggacatgattcaaaccgacgcctcgatcaatcccggcaattcgggagggccgctgctcgattcagccggccggctcatcgggatgaacacgctcatctattccccctcgggcgcctccagcggcgtcggattcgccgtgccggcggacatcatcgccaaggtcgtgcccgaattgatcgcccacggccgggtcacccggccaggactgggcgtctccttcctcaacgacgcctatgcccggcgggccggcatcgagggggtgatcatcctggaagtcccgtccggaaccccggcgtacgccgccggactccgcggcctgggccgggatcgcttcggccgccggaccatcaacgacgtcatcacggccgtcgaccgggccccggtcacgtcctatgacgacttgttcgccattctggaaagccgcaagatcggggaaaccgtgaccttgagcgtggaccgggccggcaaagtccgcccggtccgcgtcaccctcgtccgcgattgagcgtcgtggacgtcatcctggcctcgcggtcgccccgccggaaggagatcctcggccggatcttccccgacttccgcgtcattcccagcggcgtggacgagagcgccctcgaccaaagcgatccggtcttcttcgtccgggaagcggccgtcctcaaagcccgcgacgtcggggcgcgcttcccggattccctggtcatcgccgccgacacggtcgtctgcctggaccgggagatcttcggcaagccggaaacccgggaggacgccgcggcgatgctcggccgcttgtccggccggcgtcaccgcgtcctgacgggagtcgccctcttccgggcggccgacgaccgtctcgtcgtcggttacgagacgacgcatgtcacgtttaaggccctggccccggaggagatcgaggcctatctcgaccggaacgcctacgccgacaaggccggcagctacgccgtccaggacgtcggggacgcgttcgtcgagcgcctcgagggcgattacgacaacgtggtcggatttcccgtgaagcgctttaaaaagctgctgaaggaattcaaggccccggagatggagctcgaaatcactgggatcgccttcccgaaaagctggccggtcgcccgggcgggggaaaaggacgtctgggtgccgggggccgtcgtcggcgaccgggtgagggcgcgaattctgcgccgcaacccggccgtggcgaaaatcacccgcctcctcgagccgtcgcccctgcggacggaggccgtttgccctcatttcggagcctgcggcggctgcgctttccaaaacctgaactactccgaacagatctcgctcaaggaaggctatcttcgccgggtgttgggaaaggagggaccgcccggggcggcggaggttcttgagcccttcctgccctcgccgtcccttttcggctatcggaacaagatggaattcgcctttgccggagccggcggggaccttcgcctgggactgcgcgaacgatccctcccgcggacgaagtcccgtaagaggacggtcgacctcaggacgtgccccttgttcggaccggcggccgaccgcctgctgccggcggccgcggcgttcgccgaagccgacggacggccgggcttcgacccggtctcccggaaaggattcttccggaacctcgtcctccgggaggccaagggcacgggcgaggtgatggtcatcctcgtcacccgaagcggcccggcgcccggactccgggagtgggcgggccggctggccgcggacatcccggccgtccggagcgtttggcacgtcgaaaacgaccgggacgccgacctcgtggaatacgggaacaacaccctgctcgtaggggcggccgggatcgaggaggaactttccggtctgagctttcggatcggtccggattcttttttccagcccaatccgaagggagcggccgttttctatgaaaaaatcgccgcccgggcggccgaggtctccgcgaaaaaagcgctcggccttttctgcggcccgggggcgatcgagatgtttctcagccggacggccgcagaagtcgtcggcgtcgacgccgagccggccaacatccagagcgccgagggaaacgccgtccgcaatggtttacggaatgtccgcttcatcgccgggctggtggaaaaagtcctcgaaagcacggacctctccgggaccgacctcgtcgtcctcgatccgccccgggacggccttcatcccgccggattgactctcatcccggcgctgggagcgccccatctgatctacatgtcctgcaacccggcctccttcgcccgggacatccgggggctggcggcttcgggctaccggcctgagcgcatcttcgccgcggacttttttccccacaccccgcacttcgaggtgctgggattcctctcccgctgatttcatggggagacgccatccccattcaccctattttcgccggggcccggagacgacggttgtttgatatatgaaggatcattctcaaagaacaccaggccaaatgagcgcattgaatcaacgaatatgcaaccgaagggggaaagaaggacttttctccgatgctccgctcggcgaacattatttgacatggccctgttttcggattagctttttccttgaaatcgtcattagactcatgggtattgtgtctcccgatcgctcctgtttttgaggatggtcatgcccgggaaatccgccgccgcccggtcgaaacggctgatgtcggccgagcgccggcaggagattccccccgagcgcgttctggagacgatcggcctccgtccgggccaggtcttcatcgacatcggcgccggtccggggtttttcgccctgccggcggccgcggccgtcggaccgaggggccgggtcgtggggctggacgtttcgccgtcgatggtcgaagagcttcggaaaaacgccgcccgggccaaagcggccaacctccaagcccgccgaatatccaaaacgagcccgaacgttccgcccggggcggatttttattttctggccaacgtcctccacgagatcgacggccgggaagcttatctccgcgatctccgcaagcgcatgtccgccgcctcccgtctcgtcatcatcgactttctccggaagaaaacggagcacggtcccccgctccgcgaccgaatccccctccgggagttgcggcgcctcctggccgcgaccggcttcaaagtcgagcgcgttttccgtccgaacggggaggagtacggagtgatcgccttccggaccggcgcccgcctcaaccgatgatcgccagggaaaaggccatgacaaagatggccacggtctcgcagagcccgacgacgatcaggtcctgggcgaatcccttgttcgtctcgccgaacgcgtcgcagctggcggccgagcattgcccctgggccacggccgaatagccgatcgccgcccccgagaggacgccgatccccagcttgaacaagccgtcgatgcccgcccccttgagggcgttcatgacgataaagccgtagatcgtctgggtgaggggcgccccggcgaaaacgacgagcagaaaggacgcgggcttgttggccagatagctgcgcttccaggcgccgatggccgcctgcccggcgatgcccgcgccgatgcccgagccgaccgccgccaggcctaaaacggcggcgacgccgatataaccgatgagatccatttccgcctccttactggattaccgctccgacttggccgtgacccggaaagggtcgtatttgatccccgaccactccatgcccagatggttggagaattcgagcatgttgagccggatgccgtggacgacgacggacagcacgctcagggcgatattgagggcatggccgaacgtcaggagaagcactccggcgatgatcgtgagggcgggcttgatcaagccgccgcccatgccgttgatcaccgacccgagcgacgagccggccaggccgacggcccaaagccggatataggacacgatgtcggcgaacacgcccaccgtgccgaggaaaagggggataaaattctgaagccccccgagaagcgatttgagcaggttcccttgatacgcgccgaagagaaggttggcggcgaatccgccgacgaccagtccgacggcgtacgccgggaggggaaagcgcttcgcgtcgacgacgagattgaggacgaaaaacagcattccgatgatcatcgccagcgagcccaggtgggcgaggaactgaagattcggaaacaagcggcggatattcttgatccgggccagggacagctggacgacgcccaccaggaagcaaaagacctggatgttcgccttggcgtccgggttggcgatgcagatcggcttgacggcgatcgcccggagagccggcggaagcgaggcgaagggaatcgaaaaccagttcccggtcgccgcgccccagagaatgagagccccggaaagaaagaggagaaggcggacgccgtcggggacggtccgggacttgcgccgggccttgagcgcggcggcgaggccggcgcccatcatcaggagtccgtagcccgcgtcgccgaaaatcatggcgaagaacagggcgaaaaacaccaggaaccaaaacgagatctcgaattcgtgatagccgggaacggtccccaggaattcgaacaccggctcgatcatccggacgaaccggccgttctcgaccttggtcgggacctgatccccgggttccgggtcggcggcggcgaacgcccagccgtggtctttcgcccggacggacaaggcgcccaggtcggccgccgggacgtatcccttgacgtggcaaacaggcccttcgccgatgaaggattcccgtaccgtctcgaagctcaggtcctgctcgaggatttcgagcgcccgttgcagcgaatctctctcccggcccgcggcgacccgctttttcccgatctccgcgatctccgcctcgccggccgcgattttttcccgcatggccgcggccgaaagaagcggcggaacgaattcaacaaacgccggcggcatcggcggaacgggctcgccccgccggccgacggcggccgcgagcaaccggcgccggtcggccgacaggacgacgatgtccgtcccggccggggcggtcgcccgttttttcggatccacctcgaataaacggatgtccgtccccgaagcccgcaagccctcgatcacctccgggtcgaattcgccccaagccgccgcccggtcgatctccctttggagagcggccccggcgtcctggatttcccggacacgctcctccccggccaggatccggcgggccagggcgagcgcctcatctatcgacagccggcccggcgccaggcgtttctccgccggaatgatgttgagggcggccgcgacttcgtcccgggttcgggccaggcgctcgaaccgcccgccggacggccggacgcattcgacgtggaccacgccgagatcgcgcagctcgcggagcgccccggctttctccttttccaggagaacgagccaaaccttcttcatccgggcgatcatgcggccgtcctggcgatgactttccgctgggcgatcttgccccgcacgacctgggcgatctgctggtcgccgagggagatccggatgatccggatattctccagcgtttcggggatcttgaccttttcgaacaggttgacccgctgggacgtcgtccgcagctcggccgcaagccggccggcctgcccggccaggacgtcgtcctccaggtcgacaagaaggatctttttcatccgctcgacggccgcgtccacccacaggggggcggtgaagaaatcatattcggcgaccgagaaatccgctccctcgaagaccgggatgtccaccccggccacgttgccccgggacgtgcggacggcggcgacggagagaaacggccggccgtcggggccgcacagggcggatgactctccaaagaccgcgatccaggtccggaattcccggtcgagctcctcgcgggccgtccggagctcgcgccggcgggcttcgacgatccggagctccacctgcagctgctgtttcttcatctgcaaagtgggcaggtagcggaggtacgtcttgagggcgtcccgctgcctcttgagctcgtttttcgtcatcttgaccttggccatcgcgggcgcctcaggcggtttttttcggccagtatttttcgagaagctcggtccggagccctgtttccaagggttcgaaacaggcggccaggatctgccagcctttgtccagggcgttctcgaggcggatgttgaccgagaggtccatcatctcccgttcgaacagctcgccgtagcggaggagcttgcggtcccaagaggtcatcaggaagcccatggcccgcttttccagcgtttccttgtaggacgcgtacagcttgatcatcccgtccatgatcggccggtggtccggccgcgtcttcgcgttgaccaactgcttgagccgggacagcgacccgaagggttcgatccggccgttcttgaggtagaactggccctcggtgatgtagcccgtgttgtcgggcaccgggtgggtgacgtcgtcgcccggcatcgtcgtggccgccaggatcgtgatcgagccggcgtcggcgaaatcgacggccttctcgtaccgggcggccagctgggtgtagaggtcgccgggatagccgcggttggagggcaccttttcctgggtgatggcgatttccttcatcgcgtcggcgaaattcgtcatgtcggtcaggaggacgaggacgttcttgccccggagggcgaaacgctcggcgaccgccaaggccaagtccgggaccatgaggcactcgacgaccgggtcggccgcggtgtggacgaagaggatggccttggccagggctccgccctgctccagggcgtcccggaagaagaggtaatcgtcgtgggtcaggcccatcccgccgaggatgatgacgtccacctcggcctgcagggcgatgcgggccaggagcgggttgtacggctcgcccgagacggaaaacagcggcagcttctggcttttaaccagggtgttgaacaggtcgatcatcgggatgccggtccggatcatctcccgggggatgatccgcttgctgggattgacggaggggccgccgatcgggatgaggttttccgaaaggcgcgggccgtcgtcccggggctcgccggccccgtcgaaaatccggcccaagaggttgtcggaaaagctcacccgcatcggatggccgaggaagcggagcgagtcgccggtcgagacgccgcggccgccctggaacacctggagcgagacaagatcgccgtcgaggcggatgacctcggccaaagacgagccgaaccgcgtctcgatcgaggccagctcgctgtagcggacgccctcggcccggacggtgatgacgtttccggtgatcgattcgatccgggaatacactttcttcatgacctactccagcgcctcgatcagccgcagccctttttcgtcgtcgccgccccggcgttcggcgaggagggcccggatctcctccgacaaggcggcgtaccgctcgctttgccagggagcgccgttgaggtcgagaaacttctggcggaggccggagaaccagcgccgggcgtcctccttgtccttggccttgatctccgccgccaggatctccatgatcaggcggtagctgtccttttgacggggcggatcgacggccgcgtccacggcgtcgaacgagttttgctggatgaagaccgcgtccagcagatcgcccttgagataaacgatatagtcgtccagcgacgtcccctcctcgccgacgactttcatcatttggccgacctcggcgttctggcggaggaaggcccggccgtaatcgatgatcgggccgtcgatgatgccgtcatatttcgaccaggattcgaggggatggatcgccgggtatttgcgggcgtccgaacgctcgcgggaaagcccgtggaaggcgccgacgaccttgagcgtcgcttgggtcaccggctcctcgaagttgccgccggccggcgaaaccgtccccccgatggtgatcgagccggtcgcgccgtccttcagccggacgacgccggcccgctcgtaaaacgcggcgatcaccgattcgagataagccgggaaggcctcttcgcccgggatttcctccaagcggccggacatctcccgcatggcctgggcccagcggctcgttgaatcggccaggaggagaatgtccaggcccatctggcggtaatattcggccagggtgacggcggtgtagaccgaggcgtcgcgggccgcgaccggcatggagctggtgttgcagatgatgatcgtcctctccatgagcgagcggccggtccgcggatcgatcagggcggggaattccttgagcgtctcgacgacctcccccgccctctcgccgcaggccgcgatgatgacgatgtccacgtcggcatggcggctggtcacctgctggagaacggttttgccggcgccgaaggggccgggaatgcagtacgtcccgcccttggcgacggggaagaatgtgtcgatgaggcgcgttttcgtaaccagcggctggacgggccggaggcgctggacatagcagtcgaccgcccgcttgaccggccaggtgaagcgcatggtcacatcgaccgatccgccgccgtcgtccgtcaggcgggcgacgggctcgtcgacggcatactcgccggccggcttgatctcggccacggtccacgctccggccagggaaaacgggaccatgatccggtgggagaacgccccttcgggcaccgttcccagggcgtcggcccgctccacccggccgcccgcctggacgaggggggtgaaagcccatttccggcttcggggcagcgcctcaagatagacgccgggagtgaggaagttgccggttttttcagcgatctggggcagggggttctgcaggccgtcgtagatctggccgagaaggcccggcccgagctcgacggaaagcagctcgccggtgaaatcgacggggtcgccgaccttgatgccccgggtgatttcgaacacctggacctggacggtcccgccctggacgcggatgacttcgctcttcaagcgcgtgtcgtcgacatgaatataggcgacctcgttcatggtcaccgttccttgggtgaagacggtgaccatgttgccgttgacgccggtcaccgttccgctggtcttcgtcatggggtttctccggtttgttcgggtgtccgcgccgcctctttgaccgcgtcgtaaatctcctggtaattccgctccccccgcccggcggtcaagaccgccaggcgctcgagaatcaggagctggaggcggtaggcgaggagggagtcgaaatcgaaaaccgtcaagccgcggagccggtcgatcctcatccaccgcacgctttccaaggcgatttccgcctccagcggcgtggacgcgtccggaacagccaggaagacgctccgggcgtcccgggccgcgtcgtcgtcccgtccggccggacgacgccaccggtccccgctccgcccgagccgggcggcccggagagagacgagctcgttgcgcagcgatcgctcccaagcgtaataccggtcgagaaggccggagccggccggcggcggaagatccgggccggactgcagcgtcgtcttttccaagagggcgaagtccatcgggcggagatgaaggcgtccgcgccggagaaaatcagccgacgacaacggcggcgggacgccgagggaaagggccggcagagtcgaggcgaaatagtaatagcggcccatgtcctataaatccttgaccgcctcgcggacgatgccggccaagcggctgttcaggtacttggaaaagagctcggccacggcgtccgccgaaaagtcgtagtacgccgcgccgttcttctcggccacccggaatcccgccgggacgccggggaacggcgtgaaggtgaagcccttggccagctcctccttgaggcgggcgtcgaaccggtcccgcaccttccggagcatttccggatcgagcagaacggacaagtcctcggcgcccccggcggccaagcttttcagaacatccggcagggcggcccggaggatctcctcgtcataggcggcggccacggcgttccggacgacggcgtccaggatggccgcgatcttatcgcggaaggccaggaccaggtcgcgggaagcccgggccagggaggcccggccggcttcctcatcccgggcggccgcggttttcgccttcgtccggatctcgttcgcttcgcgctcggcctcggccaagatcgtctttttccgttcctcggcctcccgcaggatctccgcggctcggcgctccgcttcttcctggccttcgcgcttgatgcggtcgagcaattcttgaagctgaatctccatgtcgtcctctcgcgattcgatcgtttccggcgtccgcggcgttggcggtccttccgggcatgcggtccgggaggcgttttctcggagatcccggacgtttgggaatccgtcctgtccggggccgaagcgggcggccatcccttcgggatgatctcctcgattgagaaagaatttataaaccgaaacggcggggctgtcaaaccgcggcgatgacggaaagccccaacggacgtccttcgggaacgcggccggcgtccgccggcggatcgaggagaaaggggacgtcaaccgcggccgccggacggagcgccgccgatgatccggggacgggacctcctcgccgcatcttcattcgcgggagagcgtcccgtccccgccgggcttattccccgccgatctgcatcagggcgatccgaaaagtcggggcggtgagtccccggttgaggtcgagatcgtcgccgatcatatcgatgccgttgagcatctcctcggccgtcccggcgatcgtcacgcccttgaccgggaaggcgaccttgccgtcttcgatccacagacccgaggcgccgccgctgaagttcccgttgaccggattgatgccataaccggtgacgtccttgagccataggccggccttggtggccttgacgatctcctcgggcttgtgcgggccggcttccatatagaacgcgtgcggaccgatgcccgggatgctcgagaatccgccccgggaggcgttcccggtgctcttgaccccggccctcttggccacgatcgtgttgtacaagaagcccctgaggacgcccttgtcgacgatcagccgccgccgggtcggtacgccttctccgtcgaacggcacgctcgccaggccgcggggccgggtgccgtcgtcgacgagagtcatggtctcgaccgcgattttccggttgagcttggcccccaggaagctcgcgccctgcaggacgcgctcgccgtcgacagcttggaggaggccgcctaggatggcataggcgacgtcgggatcgaaaatgaccgccgccttctgggttttcagcggccggggatcgagaagctcgatggccttgcgggcggccgcggccgcgatctcctcggccggcttgaggtcggcccagaagcgccgggagcagtactcgccgccggaggatttctggtcgcccttttcggccacgaccgaaattcccatggcgcaggtggctcccttggtggtcttggacaagccgtgggagttggcgatgaacacctcgttctctccctccccgtagcccgccccggcgctcttggtgatccggggatccttcatcgagagcttctcgagcgtcttgaggagctcgatcttgcggtccgtggagacccgggcgatctccgggtcgtagagcccctcgacggccgtctggcccggatcgtcgggaaggacgttgaactcgtcggccgtcgtgacccgggcgaactcgatcgcccggccgatggcgtcgtcaagcgcgctgtccttgaaatcattggagccggccagggccatccggccctggacgaagacccggaagccgacgccctgtccggccgcttcctggatcgtctcgacctcgccgttgcggacctcgaggctcaggctccggcccgtctcgatgtacacctcggccgcgtcagcgccttttttgaggcagtccttgaccagcttttccgccaatattttcatgtccatgttcgttgctccttcgtttccgccttacgcccgggcccggctgccgccgacgttgatgccccggaggcggaccgtcggctggccggccgtcacctcggccgactgtcccttcccgcagatgccggggccgaactcgaggtcgtcgccgacggcgtcaatgttctggatgatgtccaggcagttgccgatcagggtcgcgcccttgaccggcgtcgttttccggccgtcctcgatcatgtaggcctcgcggcaggtgaaattgaagacacccgtcgtcggatcgacgcttccgccgctgagggcctggacgtagatcccgttcttggtggaggccaggatgtcggccggcttgtcttttccggcggcgatgaaggtgttcgtcatccggggaatgggcagatagcggaagctctccctccgtccgttgccggtccgctccatcttgatctgcttggccgaaaggacatcggtcatgtatttgaccagcacgcctttgtcgatcaggacgttgcgcttgccgggcgtgccctcgtcgtcccagttggtcgttccccggaagttggggagggttccgtcgtcgatcatcgtgaacacgtcgctggcgaccttctggccgagcttgccggtgaaggcgccgatcttgcgggcgatgttgtcggcctcgaggggatggccgacggcttcatgaacgagaacgccgccccagccgttctgcatgaccacgtccagcttcccggccggcgcgtccttggcctcgagcatggcgacggcctcgcgggccgcggtcagagcgatccgctcgggcgtcacctcggcgaacatctcgaagccggagtgccggctgagccgttcgcggcccatgtgccgggtgtcgttgccctcgctcagggcttggacgatgaagaacaggagcggcagctcgtcgacaagatacaagccctccgagttggcgatcgtccgcccccggacctcgtcgtaatagctgatcgaggtcattttgatccgcggatcgtggccgcgggcggcctggtcggcccgccggcagacgtcgagacgcttctcgtcggcgatcccggacaagggaagcttgaccgtgatgtaaacggggggcgcgcccgcccggatcgggaccggcttcgccgcggcgctgccccgggcgatgaacgaggcgacttcggccgcccgcagcatggcctcctcgccgatctcgtccgtgtaggcgaagcccgtcttgtcgccggcgatgacccgcacgccggcgccctggctgatgccgaattcggcgctccggaatttggattcttccatcaggatgttccgcgaaatgcggtgctcgacgtagacgtcggcgaactccccgcccttggccagggcccgggccacgacccggtcgagcacggccttatcgagggccggtccgacggccgggagatcccccggtcctgtcttggccaagagatccttgagaagaatcggcgaagccgcgatcgccaggccgcccttgacgcccatctccaggaatttgcgccgggggatatcgccggcgaaaatgccatgtccgctcatgacgctctcctttgttgagggattgatatgatcgaaagaaaagggaaccggattttcttttttccgtcggaaaccgcgcgtcgtttcatcaatggagtgctccgggccggacatccatccggccggtttgtttatcggcttgcgaaaaagcgcttccgcgacttgacattgcagcacgccgccggaaagaagtcaaggacccgcggccgggaacgcctttttttcgaagaggcgcattcgctcaacttcaaaatccatgaggggacgacgcgccgcccctggaggggctgcgtctccataggatttgtgctagattaattcctcgttcttttcatcccggtcaggaggatgccgtgaaaaagaccgccgccctcatcctttccgtcctgttcgttttctccctcgccggctggagccggaaaaccgaagcggattccgggaaagccgtcccggacaaaacgcctcttctcacctccgagatcctctccggcctcgccttccgcaatatcggaccggccgtcatgtccggccggatcagcgacatcgtcatccacccgaagcgccgggcgacgtggtacgtcgcggccggctccggaggcgtctggaagaccgaaaacgccgggacgacctggacgccggtcttcgacggccagtcctcctattccatcggctgtctcgccctcgatcccgtccgtcccgagatcgtctgggtcggaacaggggaaaacgtcagcggccgccacgtcggctacggcgacggcgtctacaagagcctcaacggggggacgacctggacgaacatgggcttgaagaattccgagcacatcgcccggatcttgatcgatccgcgcgatccggacgtcgtttacgcggccgccgagggtccgctttggtcgcccggcggggagcgcggccttttcaagtccgtcgacggcgggcggacctggacgccgtcgttgatcatctcggccgccacgggcgtcgcctcggctgaattcgagccgggcgatcccgacatcctctacgccgccgcctaccagcgccgccggtccgtcgccgccttcatgggcggcgggccggaatcgggcatctacaagagcgaggacgcgggaaaaacctggcgcaagctctccgtcggcctgcccaagggcgacatgggcaaaatcggcctggccgtctcgcccctcgatccgcgcgtcgtctacgccacgatcgaggcctcgcccgaggaacggggtttctaccgctcggccgaccgcggtgaaagctttgagaagcgtaattcttacctcagcggcggcacgggcccccattactaccaggagatcttcgccgaccccaacgtcttcgaccgcgtttaccagatggattactggctccaggtgacggacgacggcggccggacgttccgcaccgttccggagaaaaacaagcacggggacaaccacgccctggccttcctccccggcgatcccgattacctcctcaacggcagcgacggcggcgtttacgagacccgcgacggcgggcggacatggcggttcttcgagaacctgcccgtgacccaagtctataagctcgccttggacaacgacctccccttctacaacgtccacggcggaacccaggacaacggcagccagctcgggccctcccgcaccctcaacgccaacggcatcgccaacttcgactggacgatcacgttcggagccgacggctacgcctgcgcgatcgaccccgtcgatccggatacgatctacctcgaatggcaggaaggcaacctcctccgctacgaccggaaaagccacgaaacgatcttcatctcccccaagcccgagccgggcgaaccggccctccgcttcaactgggattcgccggtcctcatcagcccgcattcccatacccggctctactacgccggccagcatgtctggaggagcgacgaccggggcgactcctggacgcggatttccccggatctgacccggaacatcttccgcctcgcccagcccatcatgggcaaaacctggagcgtcgacgccctctgggaccacggggcgatgtccctcttctcgacgatcacgactctcagcgagtcgcccctggcggagggtttgatttacgccgggacggacgacgggctgatccaggtcaccgaggacggaggaaaatcctggcggaaaatcgatcgcctgcccggcgtcccggagaatttcttcgtcaacgagatcaaggcctcccggaccgaccgggacacggtcttcgccgccgtcgacttgcacaagacgggcgattaccgcccctttctcctccggagcgacgaccgcgggcggacctgggtctcgatttcgggcgatcttccggcccggacgatcgtctgggccgtggcccaagatcccgtcaagaaggatcttctgttcgccgggacggaattcggcgtcttcgccaccctggacggcggaaagcgctggctgaagatggccggcggcgtgccgacgatctctttccgggacctggagatccaggagcgggaaggcgatctcgtcggcgcctctttcggccgcggctttttcgtcctggacgatttctccccgctgcgccggatcgacgaaacccttctcgcccggccggccgcgctcttcccggtgaaaaagaccctctcctacattccgcggaggccgatcgattcaccggacaagggctgtctcggagagacgttcttcaccgctcccaatccgccgttcggcgcgattttcacctattatcttaaggatgggctgaagccggccgctcaggcccggcgcgacgaggaagccaagtttctgaaggaaggaaaacccgtgtctttccccggctgggacgttctccgcaaggaggaggacgaggaaaagcccgagatcatcctgaccgtcgcggccgcggacggatcggtcgtccggcggctgaccggaccggccgggccgggcctccaccggatcgcttgggaccttcgctatccggccgtcgagccgacccggctggagtccgcggtccgcgatccctgggacatggagccgatgggcccgctcgttgtcccgggaacgttctctgtttccctggcccaaaaaatcgacggcgtcttgattccgctcgccggcccggagacgttcaccgtcgaatcgctgacgctgacctccctcgccgaaaaggacaaagccgccctcctggccttccaggaaaaggcgggcgggctgcagcgggcgatgatgggagccggcgaagccgccgacagcgccctgcggagcctggcctacgtccggaaagcgctgctcgacacgccggcggccgatcccaagctcgcggaaaccgcccgggcgatcgaaaccgggatccgggaggccctccgtgacctccacggcgacgtcaccctcatgcgccggtccgaagcccggacgccgtcgctcctggaccgcgtctcgcggcagctcggctcgatcgggcccctcaccgaaaccgtgaaaaaggattacgccgtcgcggccgacgccttcggggcggtcctggaaaagctccgcggcctgatcgacggagacctgcgccggctgggcgaggccttggaggccgccggggcgccctggacgcccggccggccggtgccggtctggaaaaagtaaggctacttattcgccggcggccccggcgcgttccagtccggcggctcgaggccgaggaggttgcggacgaagaaatcgttccgcttccggtctccgtacgtccctccgctggtatgattcacgccggggaggacgaccagctcgaattccttgccggccttgatgagggcgtcggcgacttgcatcgtgctggacggatcgacgttcgtatcgatctccccgaccaacaggagcagcttgccttggagccgccaggcgttttccgcgttggacgaagcggcgtattcggggccgatcggccagcccatccactgctcgttccaccagagcttgtccatccggttgtcgtggcagccgcaggacgaaaaggccgccttgtagaactcggggtgaaaaagcagggcggcgagggcgttctgtcccccggccgaccagccgtagatcccgacgcgggtgatgtcgtaataccggtattcggcggccacggccttgtgccagagaatccggtcgggaaagccggcgtcggccaagttcttccagcaataatcatggaacgccttggaccggttggaggtccccatcccgtccacttgggtgacgatgaacccgagctcggccagggcctgcaggggactgaagccgacgaatgtcttggggacgtgggaatcgtgcggcccggcgtagatgtattcgatcaccgggtattttttcttggagctgaaattcaacggccggtaaatgacgccccaaatatccgtccggccgtcgcggcccttggccctgaaggcttcaggcgccttccagccggccttgacaagaccggagatgtcggtttgctcgacgcggagaacgaggccgcggtcggccgtccggcggacgtccaggatcggggcccggtcatgacgcgaagagaggtcggtgaaaaacgccatgtccgaggaaaacgcggcctggtgggtcaggtcgccgtccgtcagggcggtcaagcccgtcccgtcgaagttgatcgagtaatgatgagtgaaataagggtcttggcccggattcattccgctcgccttgaaccagatcttccgggccgtctcatccactttgtccacgccgcggacgacccattcgcctttcgtgatttggttcttgacttggccggtcgctccgtcgaagagatacaggtggttccaaccgtcgcgctcggacatccaaatgatttcccggccgtcggcggcgtcgtaccggaattttttcccgtagctggagatttccaagtaggggaaaaacgtgcggggttcctcgctgatgaccgcccggggccggccggtcgccgcgtccacctcgatgatccggtagacttggtggcccctctggttgtattcaaacgtgaaggcccggccgtcctccctccactggagctcggaaagatcgtagagattggcgaagagagcattgtcgatgtccacggcttttcgctcgtccacatggaagagcaccgggcggagaaaatcgatcacgtcgcccggcttggtgtacccgagcgaaaaggttttcggctgaagctgtccgtccggggaggattcgatgaaatcgatccgccggtgaggcccccgccggacgcggaaagcggcgatgttccttgaatccggcgaccaggtgatcgatcggaagctgtagtaatcgctctccatcccgtcgagactgagggcgaagccggcggtctgcggaccgccccccggagccccgcccgccggacggaggtaaacgttgtaattcctgacgaacgcctcccatttcccgtcgggagacgccttcgcttcggccgaggcggccggctcggcccgtccgccgacatcctgccagttgctttcgtcgctccatcgggagagaacccggctgattctgacgacggtccccgcggccagatcaaatttccatcgggattccccgctttcgaactcgatcgccttcatttgatcgacgtattcaatccgggtgaacggaagatttttcggatcgatccggtccttgagagcctcggtcaaagccccggcgagtttttcatgatcgaaagcggccgttttcgtcgcggcgtccgcgtcgaccaagacgaattcatatccagcggcggtcgatttccggtaccagaacttatgcgtcttttcgatccattccggctggtcgggctggttgacggccaggtttttccatttctcctgcaagccgccggctcgttcgtaatccgcccgggtgccttgggcggacgaaaaaaccggaagaaggagcgtcaaggcgagaaaaacgcagacaaaggttcgacgggattttttcacgggacctccgattaatgaaatcatcgcgttaaataaaatatatcacatatctaaattgatagccatacggacatcgagatgtaacgccacagagaagaggcttgatgatcggctcgggaatcgggaaagggaacgacttgatgaattttccgtcgtgccgaatgaagccgcgacaatgatgcgccgaggtcatcaagaaagccgtccttgaatccctttttctcggacccggatcgcggcggtcacgatgttcgacaagcggcggaagctcgatgccgccggcttgatcaagcgacggccggctcgggattccctccccggcgaaaacggatttttatgaagcaggcgagcggctttcccgcctggaagggccgggaagcgagccagccaacatcccgcaggccgcgtggatgtcccttcccccgctgtagcgtctggccaccggcattttcagatgctttctcagcgcatcccggaacgcggcaagctccggaggcgacgggggcttgaagcggcccgcggcgtcgttcacatcgatcaaatcaagcctgaccggcaacccccggaccagagcggccagctggatggcatcttcttcccgcgtgttgaaccccgagatcatcgtccaagccaggatcacgcgctgtccggacgctttgtggtattcccgaagcgcctccataagctccggcaggggatgggtccgctccaagggcatcacgccgcgccgccggaacggatcggcgctggtcagcgatacgaccaaccggaacggcaaccggtcggccgtgaatctccggatgcccggcacgatcccggccgtcgagatgctgatggcctcggccgaaatggccagcccgcacggctcgttcaggatccgggccgcgcgcaccaccgcctcatagttcaacatcggctcgcccatccccatgaacaccgcgccgcggacgggatgttccgaatcggcggcaaggcggatgacctgatcaaccatctcccaggccgagaggttgcggacaaggcccatccgccccgtcgcgcagaaggcgcagcccagcccgcatcccacctgcgagctcaggcaggcgacaaccttctcttctccggcccgatgaagcagcgggatccggaccgcttcgaagggttcgggaccttcgccttggaagagatatttggcgaatccgtcccgcgctgaaaccgctttgcctttttgaacgagcttcggcaggccggcgttctccctcacccaggccagagttttttccgagacttccggcaggctccgagggaaggcgtcgcgcctcagcacggccgcttgaagccgtcgggcaaggcgcagggaaatgccccggggcgccagggcggcgtgcagctcgtccgcggtggagtctttaaaccggaccatcatgggttgggaatggattgtacggaaaaaacgatccccaggccagcctgtgtcccgggtcacggcatgggggacgcctcccggggcttgggggattgatttttccggcggcgccgttcaccggaagtcagacagccagggcctgatggggccggaggaaagttgagccaagcggcacccaatcgttataatggacgggcgatccgccgagcgtcactttggaaaggacatgagcatggctgaagagctggccgcccgcgtcatctggaagggaaaactggaattcgagggccgaacggatttcggccagcccatcgccatcgacgtccccccgcccgagggcgacgaccacggagcgaagcccatggagctgctgctgatcagcttggcttcgtgcgccgggcagatcatcgtctccctgctccggaagatgcgccaggacgtccgcgggttttccctcacggccaagggcctcaagcaagccgagcatccccgcgtcttcacctcgatccggctggatgtcctcgtgtccggcccgggcctcgatcccgcggccgtggacaaagcccttcagctggccgaggacaagtattgccccgtcttcgccatgctgaaaaagagcgtcgacatccggacggagatcaccgtgtccggcgtctccgatccgccggcttgacgaccctcccgcggccggcccggatttcgagcccggccgttcttgacacttcgtccggcctgaagataggatgctttcggccgcgcggtcacccgcgcatccgagagagaggcatccggtgaaaaagatcgtctttgcccttgtcttagggctccttgtttccttcgttcttccggccgcggacaaagggtccctgctgatcatcgggggcggcgaccggccggacggcctgactgaaaaattcgtggccctgtcgcggggattcggcgcggggaaaatcgtcatcttcaccatggccagcggcgtgccggaggagtccggcccggaaacggcggccgaggttaaagccgccggagcgcccgacgcctcctggttccatctgacccgggaggaggcgctccggccggaaagcgccgctattctcgaaggagcggggggcgtttatttctgcggcggagaccaatcccgcctgacggccgttctcctcgacacgccgatccaccaaaggctgctcgagctttacggccgggggctcgtcgtggccgggaccagcgccggggccgcggcgatgagcgaaatgatgatcaccgggaacgaaaagagaacccgggaggaggacgagaacggacggacgatcgaggcgggcaatgtcgagaccgtccgcggattcggattcatcaccggcgccgtcatcgaccagcacttcgtgacccgccgccggcacaaccggctgatgagcgtcgtcctggagaatcccgggcttctcggcgtcggaatcgacgaatcgacggccgtctgggtccgtcccgacggcaagtacgaaatcgccggcctccgccaagccgtcgtctacgacgcccgccgggcttccggctcccggacggccgacgggctcctgggcgcggcggggatgaccatccatatcctccttcccggcgacgtctacgatccggcgatcggggcggtccagggaggccggaagtgaaaaaaccgagaatcccccacacgctcatcctcgtctacgccatggtcgtcctgaccgtggccgcgacctggatcatccccggaggcgaatatcagcgggtggaaaaagacgggcgcctggttcccgtcgccggttcctaccagcggatcgagagccggccccagggcttgggcgggctcttcgtttctcccgcccggggattcatcgatgccgcggcgatcatcgggatcctcctcatcgtcggcggggcgttctcggtcatccagaaaaccggggcgatcacggtcgtcatccacaacatcgcctgcctcttcgggcggagcagggccctccgggttctcttgattccggtcacgatgacggtgttctccctcggcggggcggtcttcggcatgtgcgaggaaaccatgcccttcatcctgatcttcgtccccctggccctttccctgggctacgacaccatcgtcggcgtctcgatcccgtttctcggggcggccgccggcttcgccggcgccttcttcaatcccttcaccgtgggcatcgcccaggggatcgccggcctgcctctttattcggggatgggctaccggctgatcatttgggcgggaggcacggccatcgccgtcttcctcgtcatgcgctacgccgcccgcgtcctcaagaagcccgagatcagcccggtctacgcggacgacctcgaaaaaagaaaaaagctcctggggacgacgccggccatggaaaaactccccgttctcttgcggcacaagctggtccttggagtgttcgccgccggattcggggtcatgattttcggcattctcaagtatcggtggttcatcaacgagatcgccgggatattcctggccatgggcatcctctccgggatcttgggccgtctcacgggagacgagttcggcaaggccttcgtcgacggagccaaggacatggtcaacgccgccctgatcatcgggacgacgcgggccatcctcatcgtcgccacggacggccggatcatggacacgatcctggccgggatggcctcggcgatttccaaccttcacccggtcctgtcggcccagctgatgttcctgtcccagtgcgggatcaatttcttcatccactcggggacggcccaggcggccctgaccattccggtcatggctcccctgggcgacctggtcgggatcacccggcagacgagcgtcttcgccttccagctggccgagtacatcaatcccatcctgccgacctcgggagtgacgatgggggttctcgggctggccgggctgcgctacgagaaatgggccaagtggctcatccccctggtgatcgcctgggtgattttcggtctgctgacgctgattccgccggtgctgttcaagtacggcccggcttgaggacgaaaaaaaagcctcccgcaaggcccgccccgctgctccggccgtcgtgagctccctggtctccctcgccagattccaatcccgaaccgccgattcagcggaacgcgcccttgaccaggagctttccgtccttcatcaaaacccggccgcgggcgatcacgtccgtcagttgcagctccttgtcgaaaaccaggaggtccgcgtctcgccccggggcgaccgcccccttttcctccagacggtaaatcgacgccgggttggcggaaaagagccgggccgcctgctccagagtcaggatcttccggccgacaagcgaacggaacgtttggaggagcgcccgcggcgaagccacggtcaaaccggtgagattcccggctgcgtcgaaaaccggcaggcttccgttgccgtccgagctgacggtcacccgctccagcggcacgccgccgtttataagcagccggacggccgtttcgacgctcacgtcatggtcggattctcggtccggatcggtcccggccgtcacgtcgatccgccccccggacttggcgtattcgaccgcctcctccagaagccgccggctccggttgcagtgcgtcgggacgacctgggtcaccggaatctcggtttcgcggacgagccgccgcaggtattccaggccgcgggctccgtctcccatgtggacgtggagaatcccggccttcccgcccagcatcccgccgacccggcattcggcggccgcccgggcgaattcctcgaacgagggctgggaggagcggtggtcggacagggcgatctccccggccccgatgatcctgtcgatcaggacgagatctccgcggacgctgccggtgacggtcttgaccgggatctcgtaggagccgcagaagcatcgcgtcgagatcccctcgatctccaaggcccgggctttggccaggagcgagctcatatgccgggtcaccgagtccgtgcccagacagccgagaacggtcgttatgccgccggcgacgatatcctcaacggcgatttcgggagcccgggtcgcgggaccgccctcccctccgccgcccaggatatggacgtgcggatcaatgaacccgggcaggacgcttttcccgccggcttcgatcaccgtcgtctcgaatccccggcaaacgaccgtctccgggccggcgatcgcctcgatccggccgccggcgacgagaatgtcgcgggcgccgtccgccccgggggaaaagaccgatccgccgcggatgatgatggccatgaccgcctccttgtcccccggaagataacacggcccggcggctgttgccaacttttctttattgaatggcgtatgataatgagatgccttcatcaaggagaatccccatgcttcgtccgttcccttccctccgtttccgccggccgcgtcccgtccatcggtccgcgacgccctgggccgccctggccgtgctcgccgcctcccttctgggcgcggctcccgccgcctcccaggacaatcccttgtggttgcggtacccggccatctcgccggacggccaagccatccttttctgcgccaagggcgacattttcaaaatcccgtcttccggcgggacggccgttcccctgaccgtgggcgaagcctacgattattccccggtctggagccatgacggccggtggatcgcctttgcctccgaccgctccggcaatttcgacatctacctcatgccggccggcggcggcgaagcccggcgcctgaccttccattccgcggccgacatccccagcggcttcacggccgacggacggcggatcctcttcgcctcggcccgccaggacacggcggccaacgtccagttcccgatgaccggctttcccgagctctacagcgtgtccgtcgacggcggggaagcgtcccttgtcctgacccagccggcggtcgcggccgtctccaaccgggccggggacaaaatcctctaccacgacgccaagggccgtgagaacgtctggcgcaagcatcacacgtccgcggtgacgcgcgatatctgggtgtatgacttgaaggccaagaagaacatccaggtgacggataatgaaggcgaggaccggaatcccgtcttcgaccccaacggcgacgacttctactttctcagcgagcggggcgggacgttcaacatctacaagagctccctgagccgtcccgcctccgcgaccgccgtgacttcgttcgccaagaatccggtccggttcctgacccgctcggataccggcgtcctgtgcttcggctacgacggggaaatctacacccaagccggggacgcggctccccaaaagctcgccgtccgcatcgcccaggacggccgggccgtcctcccgcgggttctgcccgtcggggggagcgggctcaccgagatgcgcctatcccccaacggcaaagaaatcgcccttgtcttccggggcgagattttcgtcgtcagcgccgaaggcgggccggccaagcgcgtgaccgacacccccgagcaggagcggatggtgagcttcagcccggacggccggacactcatctacgccgccgaacgagacaacaactggaacgtctacgcgacctcgatcgtccgcaaggaggagccctatttcttcgccgcgacgctcctcaaggaggaaccggtcgcggccacggcggccgaggagtttcagcccgaattctcccctgacggcaaggaagtcgcttacctggaaaaccggaccgccttgaaggtcatcaacctggcgaccaagcaaagccggctgattctgccgggaacgtacaattactcctacgccgacggcgaccagagctaccgctggagcccggacgggaagtggtttctggtccaattcggcgtcgtccgcctcttcaccccccagatcggcctcgtctcgagcgacggccggggccgggtcatcaacctgacccggagcggattcgacaacgtcggcgtccgctggggcctggacgggacgatgatgtactacggctcgacccgggagggcttgacaaacacggacggcaatcccatgacctacgatatctacgggatgtttttcacccgggaggcgtacgaccggttcctcctctccaaggccgaattcgctttgctgaaggaaacggagcaaaaagccaaggacgaaaaggagaaaacggagaaagaaaaggccgcggacgccaaggccaaggcggccggccttaaaaaggaagaaccgaagaaggaactggcgttcgagctcgacgggctcgaccggcggaaggtccgcctctccattcattcggcggacatcagcgacgccgtcttgagcaaggacggcgagaagctcttctatctggcccggttcgaacgcggttatgatttatgggtgaccgagccgcggacgcgcgacaccaagctgctcgccaagctgggcgtccagaggccctcgatggagctgtcgcccgacggcaagacgctcttcatcggagccgagggacggatcctcaaggtcgatccggacagcggccggcaggagcccttggccatcaccggcgagatgcgcctggacgaggccgccgagaaagcttacatgttcgaccacatgtggcggcagatcaagcagaagttcctggtggaggatctctacggggcggactgggattccttttaccccatctaccgcaaattcctccccttcatcaacaacaaccatgattacgccgagatggtcagcgagatgctgggcgagctgaacgcctcccacaccggctgttattacaacccggcccggacgacgtcggccgacgccacggcttcgctcggcctgttcctggattatgattacgccggccccggcctgaaagtcgccgaggtcttgagcggcgggccgctggacaaggcgagcctcaagatccgggcgggccacatcatcgaaaaaatcgacggccggaccctggacggcacgatcgaccattacgccctgctcaaccggaaggccggccagctcaccctgctttccgttctcgatccggcggcgtcctcgcgctgggaggaggccgtcaggcccgtcaccttggaggaagaggccgcccttctctaccggcgctgggtcctggcccggcgggccgagacggaccggctttcgggcggccggatcggctacgtccatgtccggggcatgaacgatcagagcttccggacggtcatcgatgaagtcttcggcctcagcatggagaaggacgccctgatcgtcgacacccgcttcaacggcggcggcagcctccacgaccaactcgcggatttcttgaacggccgaaaggtcttcgacatcgtgcctcgcggccagctcgtcggctacgagccgtacaacaagtggatcaagccgtcgatcgtcctgatgggcgaagccaattactcggacgcccaccttttccccgtggaatacaagatcaaggggatcgggcaaacgctgggcatgcccgtgccgggcacgggaacgttcgtctggtgggaaacccagatcgatccgactctccgcttcgggatcccccagggcggatggcggacgcccgacgggaagctttgcgagaacaaccagctggagcctgacatccgggtcaagaacgatccggacgtcatgtcggccgggcgcgaccagcagatcgaggcggccgtccgggagctgatgaagggcaaatagggctacttgcgcaaataagccagggcctggagggcggcgacgcagccttcgccggcggccgagacgacttgaaggccgccgcaggtgagatcgccggcggcgaagacgcccgggaggttcgtcctctggaagcggtccacggccaggcattgcttatggtcgagggccaggccggacttggcgaagagcgggccggtcgggacttcccgaaaaatgaagacggcctcgacgtccagcgtccgttcgccgccctcgcttttcaagacgacgcgttcgacgttcttctctccggcgatctccttgatctcggccccgccgtggaccgggatgccgcgcttctcggccttgaggaacgcttcctccagggcggcgggatccttgacccgcccggggatccaatgaacccggacgcccgtctgatccaggatccagatatcctcgatcgcctcggccgaatggccgtaggcggccgcgtcgcgccctttatagagagggccgtcgcaaaccgcgcagtagctcacgccgtagccgaggagccgttcctctccggggatctgccgctccttggcgaacggcttgccggtggccaggatgacggcccgggcctcgataaaggcgtcggacgtcgagacgaatttcgggctggactccagcgacagggcgatgacatcgcccgtcgcgaattccgccccgaaaccggccgcctgcgaccggaacttgtccagaagctcgcggctgttgatcgcggcgaacccgggataattctcgagctcgtatcccagggcgagccgcgaggccgcccgctcgctttccagaaccagcgttttcttgccggagcgggcggcatagatggccgccgtcaggccggccggcccggccccgatgatcagaatgtcggtttcatattggcgcatcgttgttctccccggacattataggggaaaagacgatgcggaggtcaaccgccgcgggaatggtcggtttccccggaagaaggcaaagacaaaccgcccgtcgaggttccaagaggaacgaagccgatccatcgtcctggacgttcccgtcgatccgccggccgtgttgactaacgccggcctccggtctacattgtctcccatggcccgccgcgcgctgaccgccgtgctcctcctggccttcgtctcggccgcctcggcggccggcccgggacgcgacggcccgtttctcctgctctccgggcaatttctcgacttcaaccgcgatctcaaccggaacctgacgctctggcattttgaaaaagcgttttacgttccgcggctggaacggggcggggcttggtccgtcggctacgggaggaaatcctacaacgggtcctgggacgtttccttcctccgtctccgccggaccgtcgcccttgaaaacggatcccgcgccgcgacctacgaggcgctcgatctcaacgggaggtccttttttctgaagaagcttcctctccggccgtatttcctcggcgggatcaccctcccgttccttagggtcaagggcggttcgttctaccgaggcaagaccttgaacgcctcctacgtcggggcggggctccaggccggcgcaggtcttcacctcgacctggggccctctgtctttctcaacgcggccgtcacgtaccgctggatcgggtttctctacgccttcggcgagggaaagggccgggacattaacgacctgcggaccgaacccatggggccggaattcggccgactcctgcggaccgacgttctgaccctgaccctgggcgtcggcttcatcctttagcccgcggttcggaagacctcctccagctgggcggcggtcaggacgtttttccccgagatcttgcggacgttccccgcctggcttgtccggatgcatgtccggcttttccggcagccgttcttcccgtccggggcgtaccccttgcagacgcggaggacgtccggggagatctcgtcaatgaggacgattctcccgtcgccgcccttcaaccggccgagctcgatcttcccgtcgatgagatgaagcccccgggacgccatctcctccgtgacgaccgccgcgatccgcttgacgaaggcctccgtccagacgacctccttgcgggtcatcactccggccgcgaccagcgactcgaaggtgatgagggtgtccgaatcgcccttggtccaggcctcgacgacccggtccaggccctggcacggccggacgaacgggtatctccgccagaagctcccggtagcgttgttccgccaggtccattccaggttcagaagcggggcggacccctcgaattccggggcttgttccggcaggccgaggggaacggcgggttcgacgatcatgacctcgtcccgaaccgaggcgatgaagtggctggggattctcttactggccgtcaggttgaagaaacgggtcgcgaaccgcccggcgatggctcccttccccgggatttcgccgaccacggagtcgtagccgggatcgaagaccggccgtccggccttgtccaggtaccccgtgccccgatcggtgaagacgaaggcatacttgcccttccagggtcctcccggtatccggtagatgtccttggacttccccgagtagacaaggttttcttttcggatgattttcgttaaatccacggcgtccctccttctccggactcggcctatcatccccgaatccgaggccgaatgcaatcccggaaaggcctttccgatcggaccgaacgcccgtccgggagggacgcccttgtccggagccgtctatttcttcgtttcttccgaaacgatgtcgatgatcgtgtcgacgaagtccttgtccgtcgcggtttccgcggggacttcgagcttgaacgtcattttgcccccgccctcatcgaaattcgagtcgagaagcatggcttccttggggagctctctctttatccgggccagggcacggtcatgcaccgaccggccctccggtcctttcatccccgtcagcgtgatttcgagcgttcccgcatcgcgccggcagacgactttcatcggttcgccgtccttccccgcgtcgcccgcctcgacccaggcgaaggatttcttcccggcctcgtcctcccggacgatccggacgtcctcgccttgatcgatccggaccgtgatgttcttgagccggtcctcggcgtccttaagctcggcttcaaggttcttcagggatttttcgagctcctcgaattccagcgtcttggctttgaccgcctcggctttctcccggatcgccttgaccttttcaagaagatcccgctcgccgatcaccgccagggccgccggaccctctccggccgtcgtccagaccacgccgggctttccttttccgtgctcctcgatgatcaccttgacgggctgctccccggctttgatttccttgccgatctcgatcgcgcggccggcctctcccttcttgatccggatttccttgacgatcgtatgcttcgatcccccttccccgggcttttcgatcaccacgatcttgtcgccgtccccggccaagtcggcggcctctccctcttcgagctgcacgatccggccttccttgatgaagcgcagcgcgccgccggcgccccggatgctgatcgtcccgcccttcgggaccgtgaccacttttccctccacgctgaacgtgatccggccgtcctcgccggttttgagggtcaggggcttgtccagaagcagttttttaatttggccttctcccgtgacggtgatttcaatcggctggtccttgtcgccgccggccgtcaccatgatcgtcttgacagaggtcttctccttctctttctttttctctttctctttcagcgcggtcttctctttttccttttccttgatggtttccttctccgctttcacctcctgggcggcggccggagccgcggcggacaacgtttcgtcgacgggagcgcccgaagatgacgccgcgttgcccgcgacggccgggcgggccgtcccgatgaaggcgatggctaggacgaccaaagccgccagcatgattctcgatttcatcttgacctccttgaacgtttgtttttgcctcaaaatcgccgccagccggtccttgaagaacggaccgcccaaaaggcctggcccggccgcggcagcccggccgcggaaatccgccgacgagcggaaggccagaaggccggcggcgtagatcgacggcttgatccccgcgcggaggaccagctcgtcgcaggcgatttcctgttcctttcgaagacgggcgtacgccagccagcagagcggattccaccaaaacaccgccaggctgagccggacaaggagcagaaagaggaaatccgcccgtttgatgtgggaaagctcatggaacagggcggccgagcgctccgcttcctcccaagcgtcggccccgacggggataaggacgacgggctttctccagccccaggtcagggggacggcgacttccgggtgacttttcaagcggacgcccctcctcagcggaaccaccgccagaaaacgggcgatcagaatccgccagcctcggtctcccggctcccatccttcccgggttaaacgataggcgccgacgaggccgaacgccagcttcaagagcaggaagaggaatccggcgaaccaggcaaaaacggccgcatgagcgggaaaaaatccgccagcagcgccggagaccgccgcgggaaccgcccgcccgccggtcggggcgttgctcgggccggctgcggattctccgcttcgggaagacggcgaaccgtcacggacggaaaggaaggaaaccgccgcggaagcgccggaaagcgccgccggcggcggggaagaaaaaacggcggaagacgacacggccgcggccggccgagccggaagaagcggtgtcttccatcctcccggcagaagacggaaaaggggtaaaaacagcaagccgatgagagcgaagcttagaaggaaatggcggaaagaagccgggcgcctccgacaggccgccgcccccagcaaggcggggacaaggacgagggttgtcttgagaaagccttcgaccaggagcgccgccgtagccgtgattccctgcatttcagcgaccctcccggcgggctttgtcgatgagctcccggagacgaacataatcgtcctcggacagattcttctcggaaatgtcgagaagggcggccatgacgctttccgtggagccgtcgaaaaacgtccttatcacgtggcggagggcgtttcgacgggctttttccttggccacgagaggggaataaacataacggggtccgtcccggcggtgagtcaggtgacccttccgctccaggactcgtatcagcgcccggaccgccgaataaccggggggatccggcaggcgctcaaggacctgaagaaccgtcgcctccttcagctcgtagatgacgtccatgatttggcgttcccgccggctcaggcttcggtcattcgtcatgcgggcctccccgttctttcggctcgatatgctaatatattagcatgctaaattattagcacccttattcccgcctgtcaagaggaaatgctaattttttaacatctacatccttcctacgtccaggcaggctcttccgttgcctctccgaataaatcgatgatgacttcggagacggctgtttcggccttctcccggcaaggggcgccgggccggaactcgtgaccttctcctgaacaacgcccccaccggcctggagtgacggctgaaaggatctccaaaccccgccgttcgctctcgtctgggagccggatatcgccggctccttgcgtccacggccgagcgaggaaaatcgtcacgaggaggacgccgtcccggcggcgggatatttcgccggagggggccgtcccgccccgaatcaggctgttgaggacatccggtttccttgacaaggggattttttcggatataattgataatgagaatcattcttaataaggaatcctgacgtgaattcaatcccggccatcaagagcgccctgaaagcctcgggccggcgcatcacctcgaagcgagaggtgatcctcgacctgttgaggaaaattcccggccatcccgacgcggaaaccctgtttttggaagcgaaaaaaattgatccccgcatcggtctgtccaccgtttatcgaaccctggccttattgaaaaaagaaggattcatcgaggagcatcggctgggacaatctcacgggcatttcgaggcgtctcgccgggccgcccacgtgcacttctcctgcctcgcctgcggtcaggtcatcgagtgcgagaatcccctggtcaaccgcctgaagacggaaatcaagcggacgctgaacgcggacctcaaggaattccatgtttatgccggcggtttctgccgaagctgccggccgacgggaggccgaccgtgacgccgcgggccgccggcccgatgaccttggctcaattgagctccgggcggcgggccgtcgtcgccggattggacggcggccgaaggctgctggcccggatggtatccctgggcttcgttccgggagtcgaagtcgtcatggttcaaaatcccggccggggagcgctgatcgtccagatccgtgaggcccgcgtcgccttaggacggggagaggcgcaccggatccttatcgctcccgcgcggctccccgcatgagcttctctggtcccgccgaaatcaaagtcgccctggccggcccgccgaatgtcggcaagtcgaccgtcttcaacctcttgaccggcctgcaccagcacgtcgggaactgggcgggcaaaaccgtcgagcgcaaggaaggaacctttccatacggccggacctccttccgggtgatcgacctgcccggcacgtacagcctgaccgcggcctcgcccgaggaactgatcgcccgggaattcatcatccgggaacgtcccgacctcgtcgtcgccgtcctcaacgccgcccttctggagcacggtctctatcttgtcgccgaactcctcagcctgcggattcccgtagtcatcggtctcaacatgatggatgtggcccggaaggaaggcctggcgatcgagcccggcgtgctgtcggcggccctcggccttccggtcgttcccatggaggcctcctcaaggggcgggatcaaggaactggtcaaggcgatcgccgcggccgctgagggcgggcggattcccgagcctcagcgaccggtaatccgggaggaccatcgcctggtcctggaccggaccggacgtttgctcgagggaacggacctcgaaccctatccccgcgactgggtcgccttgaagatcctggaaggggacgaggacatcagccggaaagtcgccgcggccgtgcctcccgggcggtgggaggaaatcctcgccttattgaaacggcatgacgacgccctggtcgccgtcgcttccggacgatacgcctggatcgagcggatgacccgggccgctctcgtccggccccagaccgggccgatctcgctgacccaccggctcgaccgctggctgacccatccgttctggggccttctcgcgtttgccgcggtcatggccgccgttttttccctgacatacgcgctcggaatccctctccagggattcctggaaaaatccgtcatccaaggtcttcaagggttagtcggcggctggaccgcctcctccccgtggtggattcggggcgcccttgtcgagggaatcctcggcggcgtcggcacgctgttgacgtttcttcccatccttattctctttttcggctttacggcgcttttagaggatgtcggctacctggcccgctccgctttcgtcatggaccggttcatgcacgccatgcgtctgcacgggaaatcctgccttcccctgatcatcagcttcggatgcaatgtgccgggagtgctgggcacccggatcatcgagtcgacccgggcccgcctcctgacgatgttcctgattcccctcatcccctgtaccgggcgaatggccgttatcgcctttctggctccgctgtttttccgggaacaggcggccctggtcgccatcggcctcattctgctcgccctgggccttcttttcgccaccgggatgatcggcggccggctgtttttccgccaggacgcggccccgttcatcatggagctgccgctttaccacgtcccccatccccggacgatctgcgatctcgtccggcggcgaagcattgaattcgtccgcaaggccgtggtcgttattctgcccgtctcgctggctgtctgggccctctcccgtttccccgaagggagggtggaaagctcgtatctcgccggattcagccgagccctggagccggcgggaaccttgatgggattcgactggaggctgatggtcgcccttttcgccggattcatcgccaaggaaaactccctcgccgccctggctgttctcttcggggccggggagggggtcgctttaggagatctgatcgtatccgcctatcctccggcggtcgggctggctttcatggcctcgcagctcctgttcattccctgcgcggccacggtggccgccttcaagcaggaaagccgctcctggcgcctgacgttgttcaatgtcgcctatctctttatcctctccgcggccgtcggcatcgccgtctatcaggccgcccggcggattttgtaagcccgcccgagccggcccgattccttaatccaggccgacgtcctgccggtaatccacccagacccggcttccccggcgggggcggagaagatccaaagccttgagaaacgtccggttctttttctgccaggtccggttgagcgcccgggcgtattggttgatggcgatggccagccaacggccctcgagaacgttccgaacctgctctttcaaggaataaaaccgccgatggccggcgatctgggctttttgaagctcggccagggacagccgtctcggccggaagacggcgtgatgggcgtcgtagagggaccaatccttgaaggcgatcctttcctcgtccatcactttcttatagaacgcgcttcccggcagcggcgtgagaatcaggaactgcgacgaagtcaagcgcgatttccgggcccacttcacggtctcccggaacgtcccccggtcgtcctggtcgaatccaaagacgaacatgccgtggatatgaatccggttgcgacggaacacccggacggcccggtcgagctcggccacggattgggccttatgggattcctggaggctccggggattcaccgattcgaacccgatgcagacggtatggccgccggcttttttcatcagccggacgagatccggatcgcgggcgacgtcggcccggacctgggtcgtccagcggaacttgaatccctcccggatcatcgcctcgaggagctcccgggtccgcggcttgtgggcggcgaaattgtcgtcgtagaagaagagattccggtttcggtccgcgtggaggcgcagctccccaaggatatgttcggtcgaccggaaccggtaagctttgccgaacatcccggtcaccgaacagaacgtgcaatcgaacgggcagccccgggatgtctggacgggaaggaccatctttttcccccgccaccgccggtcgggtttgagcaggtcgaaatccgcgtaaggaaaggcgtcgaggttccggggaggcgcggaccgggggttatggacggcttcgccgccccgccggaaggaaagccccgggatttccgacaagtccgcctccgtcctccacgcctcgagaaatgcggggagcgtctcctccgcttcgccgcgcaggacgtaatcgccgtgctccaagctttcccccggaaggaatgtgacatgcggcccgccgaaaaggacgggaatccccatctcccggacgcgcccggcgatggcataagcccggggggcggtcgacgtgatcgttgaaatcccgacgatgtcggcgcttccgatcacgccgaaatcaagcgcccggaaatcttcgacaaacagctcgacgtcccagccccgctgtttcatgatcgtccccaacaggacggtcccgaggcggggagaaggaaacttggaaaagatatggaggttgggcgaccggggctcgatcagggcgatcttaggcatgggttttctccgaggcggccggcggccgcttggcgttcttggccttgagggcggcgatctccttcttgttctttttcaacaagtcctcccaacgatcgataccttcccgcagcggcctcattttcttgaaaaggacttcggccgcggcttgaaggccatcgagcttgcggccggcctcctcgcgggagtagacggagaggtccttctggagagacaggaaatcccggacggcgtccgaaaccgccttgatctcctccaggctgtaaccgaacaattggagatcgcggacaagctggcagagatagacatagctttcatcatagagacgaaagccgccctcgcttcgcagatcgggatcgaggatgccgacgtcctcccagtgcttgatggtccggggactgacgccggctttttcggccagcaggccgacggtcaggagcttgcccttgccggcgtcttttttctgatcgtctccgctcccgggccagccgtatttcttgatgatcttctggatttcctccaggccgtagccgagctcccggagcttgcggacgtgggcgacgcggccgatgtccgggccggaataaaacggcgacttgtcctcggcgaagccgaccggccggaggatcttggctttcgtccaaagatcgatttccacaggctcgatacccgtcttttccgccagctccgccctggtcatcatttctttgcccaccataccctcacgtttattttagtttgtttccaaccatatctatacgtacacgtatattttatcagaagacaaatgtcaagaggaaacgccaacgtattatccgcgcttgaaaagcgaacgcccgggccgccgttctccggcgggagatccgccgcacgcgccgccgcggccgttttcccgacgatccggagaagcggctgatcgggaagcgggatccttccgtcctctggcttcgagaacggttctctttttaaagccgcggacgggaaaaacgcgaacaagcgacgaggaggactcgtttcgtgcgcgggagggaaagccgcgaggaaatgacggcttctccgatccgccctccgagaaggcgggccgggaaaggacgaagctcagccgtccaggtgataaaacccccggatcattttctgggcggtcttttcaggaaggaggcgcttgaggaagcccatcgccggaacaaggcgccccgtgtaatagaccggcccgggatttttcatctccatgaccttgatgatcttggcggccgcggcctcgggcggggaggctttgcccattttcttgtctcgggccagccggaaggcggccagatcggtcgcgtagacgctttccgccggagcgatcgttctcggctcgatatgtgttttaatgtaacccggaatgaccagggagaccttgatcccctgccggccgacctcctggcggaggaccttggtaaaggcctccaggccgagcttgatcgcggcataggcggattggtaaggcggggggaacgtccccgtcagcgaaccgatgttgatgatcgtcccgcggccccgttccctcatccccgggaggacggccttcgtcagccggatgaggccgaagaaatccatccggaaaagctcctcgaccgtctccatcgaaacgtcctcgacggctccgatctggctttggccggcgttattgaccagggcttccaccggaccggccgcggccgcgcaagcctccacggaagcgtcgtcctcctggtcgagggtcaggtaccggacgccggggacgggatcggcgatggtttcggggcggcgggacgtcccgatgaccgggatcccccgggcggccagggcggcggcaagagcccggccgatgcccttggacgccccggtgatgagaacgggtccctgaatcatatttcggttttgttttcgtcctcgtccttgtccgcggacttcttttcgatttcgtactgggccagggcgtccttgacggcgcccaagtcgagatggagctcgtcgcgtaccttcttataggcggccagcgtccgggcgatgtcctcatcggtatgggaggccgtcgggatcatccggaacaggacgatgccccgcggaacgaccgggtagatcactccggtgaggaaaatcccctcctcccgcattttttggaggacggccatggcgatatgcaagtccttgtaatggaccaggaccggagtgaccggcgaaggcacctcgccgaccgtatagccgagctcccggagcccggctttcagcttggcgttgacttcccacatccgggcgcggcgggcctctccgtcggccacaaaatcgagagcccgggaaaggacgtcgacatagatcatcgggaggctcttggcgaagacctgggtccgggcgttgaaccggacccactcgcagacctcgtgggtcgagccggccacgccgccgatggcggcgaacgctttggcgaacgtgccgaggttgatgtcgatcttgtccaggcatttctgaagctcgcccgtgcccctcccccccggtcccatgacgccgaagccgtgggcgtcgtcgacgaacaggcgggcgtcgtacttatccttgaggtagcagatgtcggacagcggggcgatgtccccggtcatcccgaagacgccctcggtgacaaccaggatgccgcccttgcgatcccggttgacccgcttcagatggagctcgaggctgtcgagatcgctgtgcttccaaacccggaactgggcctgggacatgaacatggcgtcgatcatcgaggcgtgggccagcttatcgatcagaatcgtgtcgtttttttcgcaaagggcctggatggtgcccagaacgccgaggtagccgtaattgaagaggatggcgtcctctttgcccatgaacttggcgaacttggcctcgaggtcgaggtgcttctgggtgttgccggtcatcatccgggcgcccatcggggcgccggggccgtatttccgggccgactcgacggcgatggctttcaattcctcgttttcggccaggccgagataattattgatcgaccactgaacgactttcttcccctggtaagtcatctcccgcccgggcaggggatcgaggatgggacgggtgaagaaaaaatcgttccgggcccgaaacatcccaaaatagccgccgtccgtcttgcacttgtcaaaaatgtccatgggttctccttgtaaagggccttatttaatcataatgcacagcgattttcaaacacgccccggataagccggaaagtcgccggggccgaagaaacacgattccctttttttcccttatgtccggggccgaaccatgttttccggcttggcgatctcgtccagccgttccttgggcaggagccctttttccgagacgacggcgtaaacgctccgccccgtggccatcgcttcctcggccagggccgagcaggcttcatagccgagctcgggcacgagggccgtgacgagggcgaagctccgctcgacggacttgcggcattgggcttcgtcggccgtgatgccgtcaacgcaccggagacggagggtgtccatcccgtttttcaacatctcgatggattcgaagatgctctgggcgatcaccggctcgaagacattcagctgcagctggccggcctcggccccgagggtgacggtcaggtcgttgccgatgaccttgaaggcgatctggttgacgacctcgggaatcaccgggttcaccttgcccggcatgatcgacgacccgggttgcctcttggggaggttgatctcgtggatccctgcccgggggccggagctgagaagccgcaggtcgctggagatcttggagagcttgacggccaagcgcttgacggccgaggagaacatgataaaggctcccgtatcctgggtggcctcgactaggtccggagcgaggcggagcgtaacgccggagatctcgcttaggtgggcgacggcccggccggcgtaatcggccggagcgcagatccccgtgccgatcgccgtcccgcccaggtggatttccttgaaaagagcggcgttctgctccaaccgctcgacctcctcccccagggtggcggcaaaagcctcgaactcctggccgagagtcatcgggacggcgtcctggagctgggtccggcccatcttgatgacatccttgaattccaagcccttggcccggaaggaggcgatgagctttttcaacacggcgaccagcgtgcgggtgctggccatgaaggccagacgcagggcggtgggatagacgtcgttggtcgactgggagaggttgatgtggttgttgggatggcaatgggcgtaatcccccctctcccggccgagaagctccagggccctattagcgatgacctcgttggcgttcatgttggttgaggttccggccccgccctggatcatgtccacgacgaaatgggtgtgcatccggccgtcgatgatctcccggcaggcgccgtcaatggccgcggcgacgccggcatccagcagtcccaggtcccggttggcccgggcggcggccatcttgacttgggccaaggcgacgatcagctctggaaagcggctgatggcgattccagtgatcggaaaattctccgtcgcccggagcgtctggacgccgtaatagaattcggccggaacgtcgcgttcgccgaggagatcgtgctcccggcgggtgcggccggagatgtactgggcggccgcgttcacgacttggttggtcgcctggcgcatcctccgggaaatgacccgggccgtccgggacaggatcttggccgccagcgacgtctccgcggccaggagcccggtgacgtccgtccgggagaagacgagggcgagggtcggctcctccgcccgggcggtggtcgcgtgcgggtagtcgtccatcaaggctccctcaccgaggaaatcgaaccggcggaaccgggccagctccttttcctcgcccagcggggatttcttgtaaagacgaaccgctccccggtaaatcaggaagaggctttcccggggctggttttcctcgaagagggcctggccggcttcataggagacaagcttcaaccgggccgcgacggcttcccgctcggccggggtcaagtcggaaaaaagctcgatggctgccagaaacccatcgatttccgccggggggagggcggcgacaacggaacgcatcatgatcggactccttgtttttcgaccgggacatggtcccggttatgcggttatcccaatccgatatccaggatcatcatcaagacaaacccggccatcgttcccaaggtcgcgatgtcggtgtgttcgccgacttgggattcagggatgacttcctcgacaacgacatagatcatcgccccggcggcgaaagccagcgcccaaggcaaaagggcttcggcccgggacacggccaggacgccggcgacgccggccagcggttccatcaagccggaaaactggccccagaaaaagcttttcgaccgcgacaggccgtcccggcggagcggaacggagacggccatgccttccgggaagttctgcaggcacattccgatggtcaaggcgacggccgctccgaacgtggccgcgccgccgcccaatccgatcgcgccgaaagccaccccgacggccaagccctcggggatattgtgaagggtgatggccaagacgagaagggccgtgcggttccagttcgtcttgacaccctcgaccttttcaaagccggcatgcagatgcggcaaaaaataatcgatcaaccgtagaaaaagcccgccgaggagaaatccggcggccgccggaagccaggggatgcgcccctgtctccgggccatctcgatcgagggggccagaagcgaccagaagctcgcggcgatcataaccccggcggcgaatccaagcaggccgtccaagacgctccgtttgattcttttaaaaaaaaagacgagggaagcgcccagggcggtggctccccaggtcaggagggtggccagcaaggcctggagaaacggcgataatccacgcagccagtcgaccatgaggggccagtgtaccaaaaacgaggattccgggccaatcgcatccaaagctccggctcccgtcgtggaaatccgaaaaccgggacggaaacgcggccgcccggcttcagaggcgcacgaggaaccggcaatccggcgcgccgcgcttaatcgtctggacgacctccactcggaccggccggccggcgacggcttcgaagacttccaggacccagccggccgagcacaggcagtaggcgtccggaagccgctccggaccggccgcgaccagctcgcaatagcaccggggatagccccagtggacgatgtttccctcgacccggcaaaggtccccgccgactttcgggccgagattccggacgaagccggcgacgtcgccttgaaatttcccggcggtttccatcaggacgccgcggcgggcgcactcccggccgcaatcgttcatcaaccgttcccggacggcgggatccaaggtcttttccatgttctccatcagcgtccggagccaagcttccttgaagcgatccctttccttttcttgttcttccggtttcagccggccggccggcccggcgttcagggcggccgcccgcccggccaagccgatcccgcagacggccttgagaaaatcgttccgtttcatggcctcctccctcccggctccgccgttttccctttcaggatcgaaaccgtttccgtcccgtccgcggggccgtccatcaagaagatcataaaacggacgcctttccccggcaaggcgaggccggcggaagggcgggagacgccggtcagaaattccgcgccttccgctgaatctccttttcctcggcatccctcgggggatcgaggcgcagccgatgggcgacgggccggccgcttttgccgacgcagacaaacgtgacgaatccctcggcccgggccggtccggaccgcgtcgtgatctttccgtaaatcgtcaggctggtccggccggccttgaccggccgggtttcgatttgaatcctctcgccgccccggaccggcttggagagaacgaggtctcggatcgccaggcagaccatcgttcccggcaaatccggggcctgggcggcgcagagataacaggcttcaacgaaccattccgccgcccggccggcatagagcgagccgtgatgattcaaatcccccggcttgaccagccggggcacgcggacgatgttcatgagtcacctcattcttgagaacgatgtcatatcaagccggggtatccgcgccgccggagagcttcatacaggacgaccgccgcggcgttggacacgttcagggaccgggcgcccgggcgcatggggacgcggaagcttcgctcccggcaagcggccaggatctcctccgggaggccggtcgattcccggccgaagaccagaaagacgctttcctcgaccggcatttccgaaaatagccgtggggccttctgcgagaaaaagaggcaccgttcggggggcgtctcccggaagaacgcctccaggctctcgtgaacggcaaggtcgaggccgctccagtaatccgcgccggcccgccggagccggcggtcgctgaggatgaatcccagcggccggaccaggtggaggcgcgctccggcggccgcgcaggtccgggcgatattgcccgtgttctgcggaatctccggcgcgataaggacgacgttgaaaaagggggaaatgggtatcgtgtctccctctgatcgcgcttattgccccgaggcccgttcgagttttttcatgacggagaacatgaacgtcgccgaaaggaggcaggcggcgaccaaaatcagccagagcgcccagaggggaacccgcatccacaagccgccgaccaagcccatgagatacaatccggcggccgtggccgcgaaccaggcgccctgggccaagcccttatacttgggcggagcgaccttggagacataggaaatgccgatcgggctgaggaacagctcggcgatcgtgatgatgaaatacgtcgagatgagccagtagacggaaacttgggattcggccggggcgacgaggccgccgagccgtttggggctgggcagaccgagcgatccgatgacgagaacggcgaaggagacggccgtgatcagcatcccaaagccgattttacggggggccgagggttctttgttccgcttgttcagccaactgaagaatccaacgacgaccggcgtcatgaaaacgatgaaaaacgggttgaaatgctggaagcgctggggctggaactcgttgacggcggaataaccggcgtaccgccaggcggccagggcgccgaacacgaggaaggccgccccgccggccagacgggctgtctttcccgagcctttccggaacagaaagatcaggcctccgagggccaggaaaatccccagcaggccgatcatgtcgaaccagatgtaggacagggccccgacgttcagctgggtgtaatcccgggcgaagaacgtcatcgtcaggccgctctgctggaacgccatccaaaagaagatgacgacgaagaaaacaagccccagggctacgagccgttccttggtctgggcgggcgtgagctcgacgacctgggacttgagggcctcggacttggccttttgtttttcggtgaaatcggcgtgcttgtaatatttccggaacgcccagaagacgagcatggacacgatcaggctcaagcaagccaccccgaatccgaaatggtaggatttgctcaaggcgttgatgtagcgctcggagaacgtccccagcgtttccagggtggcgccggcgtcctgggtccgggcgatatcaagataggcgccggcctcggtcagcgttcctttcaaaaagccgttggccagagcggggatgcgggcgtcatatgtcaatccggcccccttaaggacccaattgcttatgatttccgaggcgctcggggcgaacatcgccccgatattgatccccatgtagaagatcgtgaaagcccggtcgcgcagggcgtcgtatttcggatcgtcgtagaggcttccgaccagggcctggagattgcccttgaaaagcccggttccgacggcgatgacggccatggccgcgacgatgagggaaagccccgtgttcatccgcgtgggaagcgccagcagggcgtatccgagaaacatgacgatcaagcccaagctgacggtccggccgtagccgaggaccttgtccgcgagcagcccgccgagcagcgggaagaaatagacgcagaccatgaacatgctgtagacgaagccggccgtggccgcggtcatcccgtatttggcctgcatgaacaggacgaaaatcgcgaccatcgtgtaaaagccgaaccgctcgcccatgttggcgaaaaaggccacgaacaagcccttgggatgtcctttaaacatgaatgattctcctgaaagaaacagatccgccgtcaagaacgtccgccgggagggatcccggccgaggaggcaagacagcggcttcgcagcacatctggccggtaatatatcaccttggaggcgaaaattaaagaacgtcccggggcgagccccttccgcgacagcgcgtcccaggcggaacgacgggttgaattcgccttccgtttcgagtagatttcgctcagagatcggaataggaggctggaatgagattccctccccgccgcatcgccgccgtcatcgtcctcgccgccgtgtccggggccctctcctgcgccgtgaatcccgtcaccgggaagcaggagctcatgctcgtctcggaagccaaggaaatcgagatgggcaaagccaccgacgagagcatccggaaggagtacgggctctatcaagacgccgcgctctccgcctatttgaacacagtcgcccggcggatggttccctacacccatcgccgcgcgctggagtaccatttcgccgtcctcgacacgccggtcgagaacgccttcgccgctccgggcggttatatttacgtaacccgcggccttttggccatgatgaattccgaggccgagctggcgaccgtcgtcggccatgagctcggtcacgtcaacgcccggcattccgtccgggaatacagcaaacagctcctgctgaccggcggattagtcgtcggcagccttctcagccgggacgtggccaaggtcgcgccctttctgatggtcggcctgcaggtgctcttcctgaaattcagccgcgacgacgaataccaggccgacagcctgggagtcctctattcccgcggcgctggatattccccggcccagatgatccccttcttccggtccatccagaagctggaagagaaggccggcggcgggatgaagctgccgaatttcctctcgacccaccccttgacggaaaagcggatcgaggaagccgaaaagatgctcgagccgcaggacgcggaacggaacattttccgcaacgaactgctggccaagatggacgggctgatctacggcgaagatccgcgccagggatacgtcgaggctgacgccttctaccatcccgaaatgagattcgttttctccatcccggccggctggaacgtccaaaacacgccccgccaggtcgtcgtcgccagcaaggacgaaaaggcgggcatgatcctcacggccgaggaaacggacctctcgccggacctctacctcggccggcggattgaagccctcgaaaacgtccgaatccaggaagtctcccgaacgaaccggatgatcaacggtctgcgcgccgcccgcggaacctatctggtcagcgaggaagccggcgagggacaggcgcctcccgtcacggccgtcgatttcgactgcatcgccaagaacggcatgatctacacgttcacgagcatggcggccaaggctgattatccttctttccggaacacgttcgaccggacggtccggagcttcgccaacctctccgatcccaagcggttggccgtccagccgaaaaagctcgccgtccgccgggcggggacggctcaaaccctgaaggaattcctggccggacaaggcgtgccgtccgacaagtggccgacaatcgccttccttaacgccctggctctcgaggacaaggtcgaaaaaggccggctgatcaagatcatgaaatagaaaagggagggcgaccatgttggttcacgactcccgtcgatgaaccggggtcgtcgccctgatcgcgtcgcgatggagggcgaccatgttggttcacgactcccgtcgatgaaccggggtcgtcgccctgatcgcgtcgcgatggagggcgaccatgttggttcacgactcccgtcgatgaaccaacatggtcgatgcttgggcggtgggcatcacgatgacttcgctgatattgacatgggccggccgggtggcgcagaaaagaacggcctcggccacatcctcggcggtgaggggcgtgaatccccggtagacgttcgccgcccgggtcttgtccccgtgaaaccggacttcactgaactcggtttcgaccattccagggtcgacggtgctgacccggaggttcgttccgcaaagatccaggcgcagaccccggctcagggccttgaccgcgaacttggaggcgcaataaacgttgccggcgggatagatctcgtggccggcgatcgagccgatgttgatgacatggccgcgcccgcgggtcaccatgccgggcaggaccgcccggctgacatagagcaagcccttgacgttggtgtcgatcatctcctcccaatccgaaagaagaccgtcttggaacttgtccaggccgcggctcaggccggcgttgttgaccaggacatcgacggccttccaattttccggaagaccccccacggcccgggccacggcggcttggtcgcggacatcgagggcgaaggggaggacggcggctccgaattcggccgccagggattccgccagctccttcaggcgggcggcccggcgggcggccaagagaagcgacgcgccctcgcgggcgaacgcccgggcgcaggcccggccgacgccggagctggccccggtcacaaagacgatcttgtttttcatgaaagacacgattcacctccagccggacggaccttggggaggctcgcccggggaaaattcaaggacccattataggacattcttccgccggccggaatccggccggccgccggtcccgtcgatacgggccgacggaaattcctccttgcctgacatcgcggctccggccgggacatcgatcttcccatgatggggaaggacttgaacgtgaccggagaggtgtcgtcaggcaccgggacgaggccgagtgacgtgtcgccgagaacgtcgtcgtctgttggaaatcctgttgggtcgtagattcctgccgccttgtcgacctcccgcatgggcgggaggaccggtccgcggacgaggaaaggagggacatggctaaaaagaaaaggggccctccctttcattgcggaatgccgaaaacggcatgccgacgatcaagagatcgtcataccataaagggaaaaccccaaacaatccgagaaaccgcccgccgctcaaagcgggcggaccgagggccgcctccaaacagatacgtccttggcggcggccgcctcatcgccgcaaccgctcacgccggccgccgctccgactcccatgcgccgaggccctcggtccgccccggtcgaaacagcccgtcgtccgctccgcggactccattttcaaaataggctcaggaccctctcttgtcaatgagaatgagggggttatgacgtttcgtcttcaaacagatcaagaagatccacgcgattcgtcatcgagcctgcgaaccgcgggcgatcaactccgtctcatgctccaaaggacggcggaggcgcagcccaccccggcccgaacggagatcgccccgaaagcgcaattgcgggcacaggcgccgcactccatgcaccgatcgcggcccgtcaccgcggccgtccggccgtacatctcgaagacgccgtggggacaaacggccgcgcacaagccgcagccggcgcacttgcggggatcatattttagggttgtgacattttttaaatgacgcaagggcatcgttctccccttcatcctccgatgacggccgccaaaacggccgccgccaagccgagcccggcggccgtgagcatgaccggaacagcaaccttcatctcggcgacgactcccgagagcgacgtaaatgtcgacgaaccggtgaaattcatcgccaggaacgccgaaagcgccggcaaaaacaggagcacggccgcggccgcggccaaatccgccgggccgcccgacgggaatcctccgatcaagcacaccgccgacgcccaaagaacccccaagatcgcgcctttcgccgcgaacatccgcccgggaatccaaggcaggaggacgggagtcgccgccgcccccgcgaaaatcgccccggccgcggcggctccagccaggggggcgccgcggattccggcgatcatcgccgccagccaaagccccagcccggcgagaaaaaatttgctgcggacgacgccggcgagctccatgggaacgaggatgagtctatcccggagcgaaaacctgacccggcgcatctccggagccgcggtcatcccggcgtccagaaaggctttcaggtcagccgcccggaccgggccgaacaccgcccggaacccggtccgccgggcgatctcgggagcggaggcgcccggcgcgccgagctggggaagaatcagcgtccggtggaaaacgatctttttgagcccggacgcttcaaggcggccggcaacttcatccgcgccgaacgtgcccttccccgcggcgcaccagacattgatgcccccggtgtccagcacaaggatccaggcatcgatcccgggaagcttcgtccgcaatgcgtcaaagctcaatttatagttggctgtgacaaagacaggagaccagggatcgggggatccgagcgcatagagcccgggggcgatcgcataccggccccggccgatccccagccgcacgcgcagggccccccatcggtcgcggaggccgagacgcgcggcgacggtggggatctccccgaccgcggtcatccgcctccctgacgcgaaccggacggggtcgatggaccggtcgaagacaccggccttctccccgctcttcgtcccgcgacagcaatcgggaccgcagcaacagctctccttttcgaggccggcggcggaaggaaatttaacgagaggcatttccttttcttcccggacaacatccgcccgattcgttttcggcccgaacggcgccggtgatcagggcggccgcctcgacaaccgcctcccgccggggagcggggatccgctccaaaacggcggcgacgcgctcgtcgaagcggcgctcgatgtcccggaaggccgcttgccctttgccggacagggaaatggcgatatagcggcgatcgcgctcgcccggccgccggtcgacgaggccggcctggaccaatccttgaatggtccggctcaacgtgctggcgtccaagccgaacaccccggccagatcgaccaaggaaatctccccccgccggccgatttccagaagggcatggcattgggacaaggtcaggccgcagcaccggttgcggctgtcgaagggacggatcgtctcgcgttccagggcgcggagcaggctccgaaagcgccggacggtatcctcgttcgttgtctcgctggttttcacaacttgattgtaatatccatctgtttcattaatcaatgattattttcttccttcgaacgatttttctcggagctcgagatttttcttgacttgggaaaaatccaagaatatattttcagcagacattagccggaaaaacgttcggcccgcggaggtgaaggatgtcttcgccggcgcgggtcaagcgggatcgccggcccttagggaggaggaaaaaccatgaggaaaaaaacacgacgggccgccgtgcacctgctcgcggctcttgtgctggccgcctggccgctggcggggctcgcccagcacgaaaaaaaccaagccggaatcggccagcttcgggagaaagcctgggccgaggggcgggtccaagtgatcgtccacttcaccgtccccgacatcgaaaacttgaccgccgattcgacgcgtttcaccggcgtggatgaaacgccggaaaccgccctggagcggtcgctggccgatcaggtcttggcgaaaacgatcgagtacgcgtcctggcgggtcctcaccgagctccagggcacggatttcgaattcgtcaccggcttcgattacatcccctacatcaccctgcgggtctcgcccaacgccctggccgtcctggaaaattccccgaatgtcctggatatttccgaggatcttccgcgcaagctgatcgatccgcccggacccggcggagagggcccgaaaggcgggctttcggccgacgagatccgggtcgatcccctcctggacgacacggccgccctcgtcggggcgacggccgtctgggcgatgggctacacgggcgcggggtggtacgtggccgtcctcgataccggaatccgcaagacgcaccagttcttcaccggcaaaaccatcatcgaggcctgccgggcgatgggccgggacggcctgccgggcgccggcgattgtcccaacggcctggccgtcatgaacggaccggggtcggccgttcattatcccagcacgtatgacggattcgaccacgggacccacgtcgcgggtatcgcgaccggcaattacggcaccctggccgggatcgccaagggggccggcgtcatcgccgtgaagattttctccaagttcacggccggcgattgcggcggctcgccctgcgtttccgcttgggattcggacatcctggccggattgaattacgtctattccctccgaagcgcctataaaatcgcctccgtcaacatgagcctgggcgggggcctctatccgaatttctgcgacagcgtcaactcgtccgtgaaatcggccatcgacctgctgcgggcggccgggatcgccacggccatcgccaccggcaacagctattcctgcggacggatcagctggccggcctgcatttcgacctcggtctcggtcggatcctcgaccaagtcggacggggattcctccttcaacaactgggattcggtgacccagcggctgtacgccccgggttcgtccatctattcctccaccggggactcggattcaagctatgcctcctggaacggcacatccatggcgacgccccatgtcgcgggcgcctgggccctgctccggcaggcgttcccaaccgcgggcgtgacgaccctgctgaccgcccttcgaacgaagggcaagctgatctacagcgtctgcgacggatacaacgccgggatcccccggatccaaatcgacaaggccctccaatcgctgggcagcttcattctgaccatccagagaaacaacacctggggcacgacgacgcccgccccaggggcttacgcttatccccccaacgccagcgtctccgtcacggcggttccccaaaactatgttcagttcaacggctggaccggggacgcgaccggaacgaccaacccggtgaccgtggtgatgaaccggaacaagaccatcaaggcctggtaccaatacatctacgctccgaccgcctcagccaagaaggtcttgaaccggtcgttctcccaggcggagtacatcgacattctgacgtggcagaacagcgccgacaacaccggcctgaccatcgcctcgttcaaaatctatacggtttccggatcgacctatacgccgttgacgaccgtcaacgccgatcagacaacgtattcccgccgcaacgccggcgaggccgccacccagtacgccatcgccgcgatcacgagcgcgggccgcgagggagcgccggccttggtgacggccgagctggattaaaggagcagccatgttcaagaaaaaactcgtcctcatgattctcgcggccgcggcgatcgccatgtttctgccctccggcttgaccgccggcgccgatctgaagatccgggtcacggtcgagcgggccaacatccggcagtcgggcttcgcctcggctcccgtcatcgggggggccaataagggcgagatcttcacggtcatcgaaaaagccggcgactggtacctcattcagctggccgacgggacgccgggcttcatcagcgctgccgtcgtcgaggaagtggccgaaaccgcgccggcgcttccagaggagatgcagccggttgagcggccggccgccccgaaacccgccccggccgcgctcccggatcaggtggtcggcgaatcgggaggcaagaacacgttctccatggttctgctgcgggccggctatttcctggcctccgacgcggcctacaaggacgtgtatgagaacgggctggtcttcggcggagaagtccgcgtcggcggtcaaagcctggccggctgggtggaaggcaactaccgctcggccacggggaaaaccacctacaccgaggaagagaccaagatgagcgtcctggccttcgagggcggcgccctctaccggttcgaagccgggatgatctccccctacttcggcgccgggctggggatgtacatgttcaaggaaagcaacgagccgatgggcgaggccaaacagagcaagctcggcttctgcggcctcggcggcgtggccgtcggcctcggctcgagcttcattctggacgcccggctgaaatacagcacctgcagcatgaagccggccgatttcgacatcaatgtcggcggcctgacgctcggaatcggcttggggatgaagttttaaggcccgtaagctctccccttacttcttatagagaacctttccgccgacgatcgtcatcgcgacctcggcggaaaggatctcctcctcgggacaagtcagaaggtcccgggtgaagactgtcacgtcggccagtttgccggccgcgagcgtccccttgattccctcctcgaaggccgcgtacgctccattgaccgtgtacgaccggagggcttcctcccggctcattttctgggccgggaagaaggcttcgccgttgttcattttccgggtcacggcggcgtaaaaagacggaagcgggtccgccgcctcgacgggcgcatccgtcccgttggcgatcaccgccccggacttcagaagcgaccgccagacatagctggtttcccccgcccgcttcgcccccagccgcttgggaacccacgggccgtccgaggggcaatggacggcctgcatcgcggctacgacgcccagcttcccgaaccgcgggacgtcggccggatggaggtgctgggcatgctcgatcctccagcgcaggtccgttttgcccggatgggctcggaaggcctcctcgtagatgtcgagcgtctcccggttggcccggtccccgatggcgtgggtcgcgacctggaagccgttctcgacggccacccgggcggtttccttcatttcctcaatcgattccgtgttcaatccggccgaggagggaagatcctcgtaaggctcgaggagccaggcgccgtgcgatccgagagccccgtcgatcaaacgcttgatcgtgtgaacgctcaggtgatgggccccgtagccctcgatcttccaagcggccgcgttggcctcgatcctccgggcgttttcgctcagcatgacgttcagccggatgccgaggcgcccctcgtcgatgatcctcttgtacagctcaaccgtggtccagccgacgccggcgtcgccgacgctggtcagccccttggagaggcattcgcggtcggccagctcgatgatcttccggttttcggtcatcacttccgcgggcgtccgggccgcccgcgcccgggacgtccccaactggacgagatccatggccgtttcgagaaacgccccgatcggccgcccttctccgtccttgatgatccgcccgccggggggatccgccgtgtccgcggtaacgccggaaagctccatcgccttggcgttggccagggaggaatggccgctggcgtgggtcaggataacgggattatcgggcgagacacggctcagggcgtcgtggaacggcagtccatcgatattgggccgggggacctggttccatttttcctggtgccagccccggccggtgatgagcgctccgggaacggcgttctgaacggccgcctcgacccggccgacgatctcctcccagcttttcgccgtggtcaaatcgagcgagagcttggatgcgccgacgctcatgaaatgaagatgggaatcgatccagccgggagtggccaggcgctccccgagatccacgacctcggtctccggcccgatgtatcgggcgatctccacggccgggccgacggccacgatccggtcgccccgcgcggccaaggcttccgcctcggggacggccgcgtccagggtgacgatctttccgttagtcaggacaagggtggccggttcgggcgggacggccccggccagaacgaggcccgccccggcggcgaagacggcgagcgcgccggcgatccgggatctgattttttgcgacatgcggctatccctccataaaactcctttcctttttaaaccaaccgccggccggatgcaagacggccgaaaacctgttatgatgaggcggccgcccggagaatcgacgctcatgttcgcccttcacgtgtcccgtcgcgcccgggatgtctatcatttcgacgaatcgctgtttatcttcgacgggcgggtgattttcgccgacatccggtcggcccggcttttcgcccataaaatcaacgccgcccggccgccggacaaggccgttcgagccggcgatctttacgctctggggctcctcgaggaataccggcacgcggtcttccaggcctaccgcgaccgggtcaatccccacgttttgcgggacgcgcttcgtgacctgtccgcccggcggctcgatccggaaacggtccggggaacgctggcctttttcctccacgaatttcccccgccggccgtttacaagaaccgcgtcccggcgggaacttacctcgacgcgccgggctttcctccccggcgggaagcggctctcgaagagctgctgatgctccgcctgactaatctcaacccggccgccgcgtcctttcgagagctcttcgacgacgattcgctgtcccgggaaacagcttacctgcgcattctctcgggcctccgggagtttttcgaaacccagccgccgttcgggccggagcgccggaacctcatcgacgttctcaacgagcccgtcctggcctcgccccattcgctcaagggacagctcgagtacatcctcgcccgatggagcgccgttctgggccgtccgcttccccgcgtcgtcggcgggctggatcttctccgggaggaggagaaacccggcggcggtcccggtccctcccgggccccgggtcttggagccgattccgtggaggaatcgctcgctctcttcggcggaccggccggtccgcgcccggacgagccggaatcggagaatttcagccccgacgtcgattggatgtcctccctcgttctcatcgccaaaaacgcctccgtctggctcgaccagctgtcccggaaatacggccgttccattcggagactggacgagatcccggacgaggagctcgacgccctttccgaggcgggcatcaccggtttgtggcttatcggcctgtgggaacggagccccgcgtcccggcgcatcaagcagatcatgggcaatcccgaggcggccgcctcggcctacgccctgttcgattatgcgatcgccgccgacctgggcggcgagccggccctcctcaatctcaaggaacgggccggccggcggggcgtgcggctggcctccgacatggtccccaaccatatgggcatcgattctcgctgggtcatcgagcatcccgactggttcatcggccttcccgagccccccttcccttcctatacgttcaacggacccgatctgtcctgggacgaccgggtggccatccgcatcgaggaccggtattacgaccggacggacgcggccgtggtcttccagcgcctggacaaacggacggggagcgtccgctatatctatcacggcaacgacggaacgagctttccctggaacgacaccgcccagctcgatttcctcaatccccgcgtccgggaggccgtccttcaaacgattctgcatgtcgcccgcctcttccccatcatccgcttcgacgcggccatgaccctggccaagcggcacttccagcgactctggtacccggagcccgggacgggcggcgcgattccctcccgggccgggcatggactgagccgcaaggcgttcgaggcagcctttcccgcggagttctggcgcgaagtcgtcgaccggacggcggtcgaggcgcccggcacgcttcttctggccgaggcgttctggctgatggaagggtacttcgtccggacgctgggcatgcaccgggtctacaacagcgccttcatgaacatgctccgcgatgaggagaacgcccggtaccggcgggtgatcaaggacaccttggaattcgaccccgaaatcctcaagcgctacgtcaacttcatgaacaatccggacgaacggacggcgatcgatcaattcggcgaccatgacaaatacttcggcgtctgcacgctgctggccgccctgcccggcctgccgatgatcggccacggacaaatcgagggattcagggaaaaatacgggatggaataccgccgggcgtattacgacgagacgccccgcgaggatctcgtcgcccggcatcggcgcgagatcttccccctcttccgcaagcgggctctcttcgccggcgtcgacctcttccggctctacgattttgtccggcccgacggggaggtcgacgaaaacgtcctcgttttctcgaatggaacggatggagagcgggctcttgtcgtgtatcacaaccggtacgccgaaacccgcggctggatccggaggtcggccgccgcggccgggaagaccgtctccctggccgagggtctcggcctccccgacgacccctcggcctgggtcgtcttcaaggacgccgtctcgggacttgaatacatccgcggagccggcgagctcgcccgcgagggattgcacctggagccggccgcgtattcgcgggccgtctacaccggcttccgtctcgtccgggacgatgaacggcgtctctatgcccgcctggccgcggccttgggaggccggggaaccgtcgatgtagagcgggccgccgtcgatctccggctccgccccgtccaggcggccttccgggagctggccaacgccggtttcttcgattggctgatgacgaagaggattttccgacccggacggcctctcgaccccgaacccgggcggcaagccggggagaaagcccgagcgttcgccgaagccgtcgcccggacgatcgccgaggacgaaccgcggccccggaaagcgatcgacccggaggagatcgcggccgcggcccggcgcgaattcgaaacgatcctccggctgccggttctcgaaaaacgcggccgggcttccggctcccggaccttccaagaggcgctgcgtttcttgaaatccgccctggacggccccgccgcccccgggaaaaagccgggccggaggcggccgggagccaagccgcacgcctcgcggcttaaggccggtctcgatccgcggacggcctggatttcgctcttttgcggcgcggttctgcggacggccgggcggacggcggacaaggaaagtccggccggctggatcgaagcctggggcttggaccggatcatcgacgacgcctggcgtgaaacgggctgcgccggggaaggccggccgaatgtcccggcgatcttccaggccttggaggaatacggaggaggaatcgatccgaaccgatctgccgcggccaacgcccggcgcttggccggcatcatcaccggcgacgaccgcttccggcgggcgctcggcctcaatcgctggcaggggatcgagtacttccatcaggaagcctttgacgcgttgcgctggctccttgcggccggggccgtctgccgggcgacaggctccggccggggagggatcaccgcccaagcggctcgggcgatctcccgggctttcgccgtctccgacatcctgaggaaggcggagcgcaaatccggattcgaaacggcgaagcttcgcgccgccttgggcgcttgagagccggcgctacgacgggcgccggagcgcccggagaccggcccaggcgaaaaagaacgaaataacggccaaggccagggcgatcgcgatatcggccggcgggccgccccgggcgatccatttccccgtcagaaccgcgtgatacaggcccagggccgaaaaggccgtgaacagcaggccgaacgccgcccggaatcccttgagggcgaaaaccgccaggagcgcgaacgccgccgggatcaagctccggccgatgatccgcaaccggatcggggcgtagtcgaaaggcgggcgggacacggcgaagaaaaagagcggaatccccaggaggagaagtcccgccccgatccagaacaccggtttttttcgcttcagggcggcggccaggagaaacgccccggcgacggccgcggccgagtaaatgagatggtagccgatttcgtttttcggcacatagacgccggtcaggggcaggatgccccgggaatagaagaccaccgcggccagcccggccgccgccgcaccgatcgccgacaagcacaccgacgcgcgcttcgtcatggatttccctctcccggaaaagacgggttcattattcggtcaacggcccggaaatgtcaatccaccgtcggccgcccgcgaggaaatcgcggcttgacatcgggggggaacattgaataaaaatggaaacaacgcaggaagccggaaggaggaaaagatcatgccacgtcatcgccgcggacgggtgtttgcattcttgggcgttctcgccgtcttgttcttcgccggaggatcccggccgggggcggccgcccagctgcccgagctgaaaaccttggaagtcttcagcgacaacgactgccggatcaccctcggaacgttcaccgttcccccgaaccagacggggtcgagcttcgtgttctcgttccagacgccctggcaggcctgccaaggccccgaccgcatggattggatcaccttcggcatccgcggagccgtctcgggagagccgttgtatgaatgcacggaatatttcgacaagcggccggccctggaaaacccggggccgctcgatgggatcaccgccggtcccggaacctatatcgtctatttattgtccggacggaattcctccgtccggctggcctacgctctctcgggagaaacgcctccggccgccgcccccggcgaagtcaagccggtgacggcctaccgggacagctcctgcaatctctttccgggcggctttcaagtcccgccgggatgcaccgcttccggtttccgattccgcttggattccccctggatgcaatgctccggccccgaccgcgtggacgaaatcacgttcacgatccgcggcccggccggcgagatctacgcctaccgcgaatactatgaccagcgcccggcggaggaacggctcggctcgctgtccggcctggtcttgaatccgggcaactacgtcgtcctgctcggatcggggcgggacacctacctgactctgaactacgccctgaaccgtccccagccgcaggcggccgccggcccgggctacaagaccgcggtccttctggctgagatcgacacccgcttcacctcctggtacgtcaagatctggggaaccggcaacgaatctgtttaccgccggggcgctgattcccaggcttcccggacatattcctggacggacatctccccggaggtcatctcggacaccgacatcaccatcctcgcccccggccggatcttcatcgatgccgagttccacatggaggaccggcccgaatacgacgccgcgcgggttctttattcggtcggatcggtttacccccaggtttggaagaacaatgcctggcagacgccgccggaggtctaccaggccaactggcagaattacatcggctacaccggaacccggccgatccggccgtccaagacgttcgaatacaccgggcagatgggggggccgatccagatcctcgggacggggctgcccgtccagccggggaaattccgggtctccgttctttcagcgatcgccgaggactggaagatccactacccgtcgacgggcaagatctacgtttatttcatcccggattgacgttcggatccaaggacaaccggccggcgatcagacccggttgcaaaggcccttgaagtcgcaatagagacagacgcggtcggcctcggccgccggcttgaaagggacgccggggtcgacgatttcagccagcaaccgatcgatgatcgtccccatcgccgcgattcgttccgcccggacggacggctcgaccggccggcggccgtccgggacgtcgaagggggagacttcgattccgggtccgatccggcttttcccgagcatgacgaaacggccctggatgcgatcttccgcccgttcataaagggcggcggacagaacggtgtaaaggggcatctgaaggctgccgacggctttcggccacgtcgcccggtcgtctggatcgagcgtcttccagttgatcccgaattttttctcgtcggcggacgtcttgtaatccaggacatagagctccccgccgcgcgtctcgacccggtcgaagcgcccggacagggtgaacgccccgcggcggatcgtgctcgccttgcggatccggttttccaggtccaggatcacaatgtccttgttttcggcccggcaggcgaggatgacctcgacctggcaccggttgatgtaatccaccaagtggcgcttcgtttgcagcagcatcaagtacgcccggccgctgagattcgggccaaacgcccggcggaagagttcctccacccggctgctgagccgcccggccgggaaatcctccggtcgaagcggccgtcccagaagcggcgcgaactcctcctccaggacgcggtggaccagcaacccgacatccttggcctcgatctcctcgtcgatctcctcccgctccctcaggccgaggacgtagcggtagtggaaccggagagggcagcggagatacgcgtcgagcgaggtggctgaataagacagctcccggagcatccggacggtttcgtctgttttcgggatctcgtccggccggtacgggccgagggcggcccggtaccggacggtcccgacgggcgtttccgatttttttcggggatcccgcttccgcgactcccaaagcagcctctcgacatagcggcttcgctcccggtcccggccctcgacgaaaaacaagtggacccggcgggctccgccgatcaggacgtcgagatagtgctcgatctcccgttccttgtcgcgggacgcgggcaggccgagcgcccggcggacgccgggcggaagcagggagtcgccgcgccgggacgccggcaggacgtcctcgttcacatcaagcagatagacctcctcgaacgggatcccccgcgtttcccaaaatccaaggacctgaagaccgcgaagcggcgtgccgaaaaagggaacggagccggccgcggccatcttgcggaacaggttgaaatatccttcccgctcctcgaagaccatgtcccgaaggagggagccggccagcctctccagccgggcgcaaaacgcctcggcgtaagggtggaagaaataatggcggcgggccgtgccgttctcatacacgaagtcgaggacgcggctcagcttgccggcgaaatcgccgaccgaggcgatggtccgcaggggctcaagcagcgcctcgtgaatggtccgcaggtggtcgagaaaatcggccgggacgggggcgccttccacgccccgggacaagcgggccacggcttcgcggacggccggttcgacagcgatttcctcgagcgcccagaaggcccgcccttttttttcggtcagggcctcctcgacggcgtgaaaaaggatccgggtcaagtcggaccggcggcccggccccgggaattggatgtttttcgtataaggatggaggacgaagcgcagataatccggcgcatagatccggccctcggcgtcggccgactggatgacctggagaagccgctcaaaaaacgtgaagaccggcgtccgggtcagggggtagccgagggaaatgttatattcctccggggcgaggtcgtccagcgtttgatgggagagggggaacagcgtctcggccgccggcaggacgacgacctggcgctcgttgaagagggccggctcggcgagcttcggggccaggagggaattgagggcgaacacttggccgtgggcatcgggacaccgggtgaacgtgatctccggaagggagccgcccgccggccctccgccggcggccgccgccggctctagtccgaggcgctcgagaaggcgttcgactccggccgcttgatgcgcgaggagggtgaaatcctcccagccgagcatcctccggatcagcttttcctccgccgcgttcagggaaaagaaaccggcgaagatgaaccgatcggcgccggcgaaccgcccgcggtcgatcccgtcggcggccgcccggaggcgcagggccggggtggaaaagccggcggcctcgaccgccgcgaggaatttttctaaaaaatacgagaggtcttggagacggttgcgggaccgatcggtcaacaagtcttcccccgggcccgagatcgcgtcctggaccgcctggtcgagccctttctccttcaaggaggcgccggtgaagccggccgcgatcagctcctcgaggtcccgaaagagcttgacgccgagggggaagaaatgatcggccgtgaggaaacgctccccgccgagacggcccggggcgctccgctgaatgcccaggagtatcgcgaccgcgtcgaggacgtcgagcggccggttccgacgtccgaggccctccctgtaaacgaaatcggtgaacgcgtcgacggagaagatccgcggggggatgaatcccgctccgatccggccggccagatgcttgcggaggtaatacgccggccggcgttccgggaagacgatccaagaccgggaaagatcccggccgccggaaggcagaaggccggccacggcctcgatcaggctctcccgcgggggcaccagccgaatccgtccgacgctcattccacctcctcgatccgatcccggtcgacaaacgacaggaaaccccggacggggcggccgggatggacatccctcagcagccggacatagcggcggatctgctcccggtaggcttccgcttcctccgtccggccgccggttttaaagtcgatgaccaagaccaagccggggtcgaggacgacgcggtccatccggaaaacgtcgccttccggatcgcagatgtcggcctcccgaaggatgaagcggtccgggcggggttcaaaccaatcggcggcgatggatttcccgaacgcccgccgcaggacatccgcggcttccccggccgccgtccgctcggccggggagaggcccaggccttccaaggccgcggcgacctccgcgtcccatcccgcccggttgagctcgactccggccaggagacggtggatccattcgccgcgccggatgccggcggacttcaacgaggtccgcatgttcaccggcggctcggtgaaaccggcccggtgcgtgatttcccgaatgagtccggattccccggcttcctcatcccgtcccttggctcgaagataagactcgggcccggccggttcgccttcccggaagctccggttcaaacgggttccatccgcgtggacgaccggctcttccgtcgaggaaggaaacgcccgttccaggagatcgaaaggaaattttccttttttgcccttgaccccgacgatgtacaactcatattgggcccgggtcagggcgacataaagcgtgttcagccggtccacccactcccggtccctggcctccccgtacgcggcactcagcgacgcttcgctctcggccagctttttattgattttgaggacatgaacgccgtcctcctcgtcatggagatagaattcctcgcccctgaaggactgaccgtaaaacaggcagatcacgaccgggatggtggcccccttggccttatggatgctcatgatcttgaccgcgtccatttcccgggggacgtcgatcgtccaattttcgtccgaatcctcctcgtccgcgctgaaggcgaggaattcgcgaaggtcgttccgtccttcgccctcgaaagtcttgatcgcctccaggagcttggacagggcggcttcctcgccggggaagagcccgaacacgtcgaattgccggtacatccgtgtcactaggtcgtaaagcggcagatagccgacgcttttgaagaacggttcgaaatactcctcccaaaggcccggccggacccggcggagagcggcatagcgcggcccgccgtcgcctcgggcgcagctttggaggaattcgcgccgggcggaaagatcgaattccttccccgcgaccttcgtgaagagatcgccgaggagaaactcagcgaaagccaggttatcgggaggagagtcgaggaagcgcagaaaggagaggatctcgccgatgatcttccggcggcggatgtcgaggctgctgtaggagacgaaggggatgtcgatctcgttgagccaggaggcgacggccgcgacttcattgttgcggccggccaggacggccaagtcggcccgtcgccagccgcggcccaagagctccttgatcagcgtctggatctcgctcttttcgggggcttcggaatcgccgccgggctccccggagttctcctcctccccttccccggtttcggcggccgccccgcctttgtcgaacaggatataacggacatatccgcgcccctcgcgctccggaagaacggactgggtgaaatgatcgagcccggacaatccggccaagcgcccgtaatcgacgccgcttttttccccttccccgccggacccggaagccaagccgaggaacacctctttgacaaaatccaggataaggccctcgctccggtagttcatctccagatcgtccggggataccggggccgaggcgaagccgtccgcgccctcctccaggtcccgcatgatccggaaatcggcgtcgcggaagccgtagatcgcctgcttggcgtcgccgacgatcaagaggcttcccccccggctcagcgattcctcgatcagcggcttgagaatccgccattgaatgggcgacgtgtcctggaactcatcgatcaggtaatgatagatgcggtcgcccagccggaaatagacgtccgggacgatcccccgctcgaggtaatggagaagctcccggtttacatcgtcgaggaagagaaggccccggccgagcttggccgccttcatttccgcttgaaccgattgataagcccgcaggtagggcagaaaaaaatcgcgggcgtgcaggcgggcgtattcgccgacaagcccctcgagggccttccattccttctcgatcctcgcgagggcctcggccgcggctcccttggccttgctcccgcccttaaccgggagcgtgccgaatgagcaatcaaggagatcggcgaaccgcccgtcctcgatcgccggcatgatccggccgcggtagtggccgcgggcggagagatccaggcccgactcttccacggccccccgcagccggccggccgtcccccggatcgttttcccgagcttcgctttttcctcctggaaatcgtcgaggacgagctcgccgggccgggctgtcagctttttctgaaacgccttcagccgttccaggatcttgggggccgggtcccaaagaaaccgcgctttttcgctttcctggacaagaagataatcaagaatccggcggaagacctcgccctcggcgctttccggcctgacccggcggagaaaccgggcgaaggcgtagtcgacaagctcgccgggatcgagggagatctcgaaatcggggccgtagcccaggtcgacggccgaggcccggaaaaccatggccgcgaagctgtcgatggtgtccacctggaaatcggtgtatccggccaagatccgctcgaccgccgcctccgagcgccggctcagttcgacggggctgaagagacgttcgtgaaactcctggtgaagcttgaccctgagcgcttcggctttctttccctcgccccgatacccttccttgagccagtcgaggatccgttccttcatctcccgggcggcgttccgagtgaaggtgatggccagaatgtgagggaggtcccggggcacgccgggaggaccgtccgtcaggagaaaccgggcaaaccttagggacagggcataggtctttcccgacccggccgaagcccgcgtcagtttgaattcggatcccatctccggccaacctaccatgccgccgcttccccgtcaacggctcgatccggtccctatgatcggcgaatccgctccccctcttgccggcgagttccccgaagattgagccgggagaggagcggggaagatcaagttgagcgcttcgccgatccgccgggccggaaagaccttgacccgcctccggcggcgcggggaaaaaagcgtccgttatttatcgccgctttcgatgacggcttggtagaccagggagcggaacttgccgtggaggtcgctgccgctcgccggcagaagctgggtcatcaggacgcagaccatctgctcccggggatcgacccaataggtcgtgtggtacgcgcctccccagccgtacgacccgatcgtccccggccggccgctttctgttcatccacaaccgactgcaggtaaagggacaagcgttccagccgctcggccgagaggccggcttcggccggggaagccgggggcaattgggccagggcggaggtgagggaaaggatcagtccgaggagaaccccttgggcggcccggcggttcagcgaggcgaggcggcaggcggacatggcggcgtctccttcttttttccggaagcgatgcaatcctccgcccactataaaagcccccgctccggctgtcaacgggccgagccgcgcttggacgcgccggcggcttcgagtagaataggcgcatggaaaccttgcgcttcgacgcggtcgtgatcggagggggggaagccgggctcgcggccgcggtcaaggcggccgagctgggcgcccgggtcggcctgatcgaaagcagctcccagctgggcggggcctgcgtggccaccgggacgctgcccagcaagacgttctcgatttcgaccgggatgttcgaaaccatcaagaaagccaaaagcttcggcgtccggatcgacggaccggtgtccctcgacttccaggaagtcgtcgccagccgcaaccggctgatgaaatgcgacatcggcgtcatccaatcgcatctccggtcgcggaaggtcacgctcgtgtccggccgggccgcgttcgccgcccccgatcggatccgggtcgcccgggccgacggaacggaagccgtgatcgaaagctcccggaccatcgtcgccgccggctcccatccgattcatctgcccgtcctgcccgtcgacggcgctacggtcatcaccaccgacgagatcgtcgccctggcctcttgcccgccccggatcgtcatcatcggagccgggatcatcggctgcgagtatgccttcatcttccggacattcggagcggacgtgaccctgatcgagaaaaccggccgggcgcttcccggacaggacaaggacgtcgtcgcggccgtcgaaaaggaattgaagcgccgcggagtcgccctccgtttcgggacgtcggtctccgcctgcgccgccggtctcgagggcggacgcctcgtgacgaccgagagcggagaaacattcgccgccgacctggtcttgacctgcgtcggccgtcgtccctcgacggaagacctcgggctcgaggcgcccggcgtcgccgtcggcgggcggggagaaatcatcgtcgacgaatgtctggaaacgaccggaacgggcatcttcgccgccggcgacgtcctcggccggaggatgcaatcctccacagccatcctcgagggcgcggtggccgcggaaaacgccttgggcggctcccggacgatcgacgagcgcttcgtccccggcgggatctacacccagcccgagatcggttcggtcggcctgaccgaggacgaggccgcggccaaggggatcccgctcatcgtcggcgtttgcccctatgcctccctggtcaaggcctgcagcctccagaccttcaatccgggctttatcaagatgctcttcgacccgtcctcccacaagctgatcggcgcccatatcctcggcccggaatcggccgagatcattcacaatctcgtcgtggccatgcggaccggggcgacggccgaggatttcgtctactcgatttatcaccatccgagcctctcggaaggcttccgggaagcggcccgcgacgccctgtcgaaaatctgacgaggcgggtcatgggtcgggattttctccgcagcggtttcatcgcccggctggcggcctcgccccgtttcccaagcgccgcccgtcttttcaccctcgccgctttcctccttctcatcgccggggggctcgccgtccctcacgtctcccccggcctgaccggaatcctgcgcaacaccagcctggcctcgctcgtcgtctggtcgctctggtggccgctggtcatcatgagcgcggccgtcctgggacgggtttggtgcacggtctgccccatggaaatggtcgcctcggcgtgttcccggatcggcttgaaaaagcggattccgcggtttctcgcctcgggccggggcgtcgtattcttttatatcctcgccctcctgggattcatccggacattttgggcgcaccgctatcccgagcgcatggccctgttttttctgtttctcctgggctccgccgcggcggctggatttctcttcaaccggcgggcgttctgctcgcacctttgccccgtcggccggatcctgggcttatacgcctgcggggcggccctggaatggcgcgtccgggatcccgggatctgcgcggcttgcggagggaaaaactgcctttcccggccggaggccggcttcggcccggcggcaacctgcccgagcgggcttcatccggccgcgatccgggataatcgcgattgcctcgtctgcaccgaatgcctgaaggcctgcccgtcgaggaatcttcggctgtcattgcgcaagcccctgtccgactttttcacgggcctgcggcttcgcaacacggacctgttcctgctcgtccccgtctccgggctggtcgtttgggagctggccgaggaatggggtccggcccgcaaggctcttgaggccgttccggccgcggccaacgcggccctcgggctttcgggcggggcggccaacttcgtccaggccgtgattctctttcttcttttccccgccttactgcttctcatcccggccgcggccggacggatgttgaacaaaacgactctcctggagtccgcccggacgttcggcctcctcctccttcccgtgacggcgctcggccacctggttaaagccctcatccggatcgcttcgcgtcttccttattacgccccggccttccgcgaccccgccggcctggaaaccgcccgggcgatcgccgccggaagcctgaaaatggacaaccggctcgccgccgccgtcgcccccgccgtgagcatcttggctgtgcttgccttggccggcgccgtcgtctcaatcggcctgatcgtccggaaaagcccggtcctgcgggcgttcggaaaagcggggcggctgtcccacggagcgttcgcggcgctctacggcttggccttgctcgcggccgccgtcttagcccggttctgaccgtcgccggccgggaaggacgctcctcgggacgccggctctatttttgcggggctttcaaatacgcgtcgaaccaggccatggtccgctccagccggtcgcggatgtagcttggcttggtcagcagatgatactgccccgggtagacgaccaattgggtggggacgccgagcgtccgcagcgcctggtacatctgttcgctgccgctgatcgggacgttgaagtccttttccccccccatgaacagggtgggcgtgtggatccggtcggcccgcaggaacggggtggacaccttcgcccaggcttccggggcgcgccacggcggcccgagctcgttgtcgtattgcatcgtgtactggtcgacgccgtacatcgcgatttggttcgagcttccggctccgctgacggccgccttgaagcggccgtccgcggcgatcgtgtagttggtcaggattccgccgtagctccagccgccgattccgagccggtccgggtcggcgacccccatccgcacggcttcgtccgcgccggccagcaagtcgtccacttccttggcgccccagtcggcaaaaatgctccgggtgaaagccgctccaaaaccgcttccgccgcggtagttgaccgccaagacgacataaccccgggcggcgaacagctgccgctccagctgcagcggatacaggccgaacgtcagggaatggtcgtcctgcatattcgggccgccgtggatccagaggagcgtcgggtatttttccccgggctcgtaatccggcggcttgaccatcagcccgcggatggccgtgccgtccttgctcttgaagctcaggtcctcgacggccccgagcttcagcccggcgaacaacgcgtcgttgtgggcggtcagcttgcggagggcgccgttttcgaaggcgtagatttccgtagccgcggcgtcggtcgcggccgcgaccgcggtccgcccgcctccgcgggcgatctcgctgatgacttcgatccccccgctcacccgcttgacggctccgccgacggccggaacttcagccgcgtatgtccgctgatcgtcctccacgaggaaggtcagggccgagccgtccggagtgaattccgcctgggagacgccgcggtcgagctcggcggtcaaaacgcgcggttcgccgccttcgaccggcacgacggccaaccgatcctggttgtaggcatagtacttcggctcgaatccccgggtgaaggccagcgttcgtccgtcggggctccagaccagccgctgcctgtccggcgcgccgatcgtcgccacttggcgcggctcggctccggcccgggcctcgacgatgaagacgtcgctcatcccggtccggtccgaatcctccccgtggccccggacaaaggcgatccgcgatccgtctggggaccaggccggatcactctcgtcatgatttgttttcgcggtcagggcggccagcgttttcgtcccgacgtcgaacaggtagagacgatcccggtgggaggccgtgagataccccacccagtcccgcttgaaggcataccggtcgatgacgatcggcttcgccgtcttggctttcgaatccgccgcctcgtccgggatttcttctccttcctgcatgaccagcacgagccgcttcccgtccggcgaccattcataggcgctgagctcgcccttgacgtccgtcaaggggcgggcctcgccgccgcgccggtcgagcagccagacctgggtcttgccgtcggccggacgggtggagagaaaggacaagtatttcccgtccgggctccagcgtggggcggtgtccccctccggccccgaggtcatcgggacgttgttccggccctcccagtcgaccatccagacggcgcttcgcgctttgtcggcctggcggtccatccaggcaacggtgtaagcgatccatcccccgtccggcgacacctgcggatcggaaatctccagtccgcccaagacatcgtcgatcgcaagcggccgcttggccggagcttgggcgaaggcgaaggccaggcaaagccaaaggatcagggcgacggatccggacgtaaaaacggtttttcgggacactcgcatcaatgcaccttcctccgattatttcgcgcgggcggtcaaaggccgccggctatttctctccggttcgctcaatgatgatttcgtaatgccgagaacggtcgtcgaaatgcgacaggacggctctcgcgcttttcggaacgacggcggcttcgtagtcttcgccggcgaattcgcggaccgcgtccagcgaatcaaacgtcatgatcgtgacgaattcgatttcccggccaagatcacgccggagcagctgaatgcttttgaagccccggatgttccggttgagaataccctcgaaaatctcttccttaagcagtttttcgtattgatcggcgttgtcccgcgtcgtccacccgtgccagatccggctgatcatcgttcgtgttcctccccggcgggaaacgctgtttctccagcacccgccgcgcgtccaggcccgccattataccatccgaatcgcccctcggcaccgcgcactttttccggaccggccgttcgagtaaaatggggggccgcggatcatcatccatgagcgacgccgatcgtcttgaatactacgaccgccgggagggacgggtcaaatcggacgccgttccggccgcccggctgacccactggatccacaacacgcggctcgggtgccgggccggggaggtccttttcgggggggcggccgcctcccgtctctacggccggttccagaaaagccgcctgagccggcggcggatcggcccgttcatgagaacgtacggcgtcgatcccgccgatctggccaagccggcccgggaatacgcgagcctgcgcgatttcttcgtccgcgacatcgacccggcccgtcgtccgttcgttcccgggtccgaagcctgcgccgcgcccgccgacggaaggattctcgcctacccggatctcccggtcgacagggtttttcccgtcaaacgggcccttttcaacctccgggactttcttcgggacgaccgcctggccgaggacttcgccgggggaacgctggtcgtcagccggctgggaatgggggattaccactacgtccatttcccctgttccgggattcccgccccggcgatttcgctccccggaaaataccggccctcgggaccctattccctgaaacggacggtcccttatttccgggaaaaccaccggatgatcaccctgttcgagacggaacgtttcggccgggcggcgatcatcgaggtcggagccttcgccgtgggctcgatccgccaagttttccggcccggcgtcccggcggccaagggtgacaagaaagcgcgtttcgagccgggcgggtcgacggtcgcccttcttttccggaaagggatgatcgaggtcgacgccgaccttctcgcccgcacggccgaaggaatggaaacatatgtccgcctcggagattcgatcgggcgggccgcggccgcttcgaatcctcgccccgcgccttgattcgctccggctgaatctggcaaaatcatcctccccatgagaaataaacacgcggacatcagccgcccgggcggaagtgattcctgaatcatgtcccttcgctcgtttcggttcgatccgtccctgacccgggaattcatcgctttcggcggctcgctttacgccggcggcgcccggcgcgtcccgcccttccgccgggagatcgtccgccagctgagccccgatttctacttttatcaacgggccggaaacgatcatcgccgtttccttgcctatcgggccggccgcgtcgccggccggatcgcggccatggtcaacgcggagatccgggacggggaccggctccccgtcggcctcgtcggcttctatgaatgcgtggacgacgacggcgtcgcggccgagcttttggaggcggcccgggagtggctccggacggaacacggcgtccggcggatccggggacccatgaatttcgacctctggcacggctaccggttcctgaccaagggattcgaccgcgaaccgtactacggcgagcccgacaacccggcgtattacccggaacaattcgagctcggcggcttcgcgccgcttcgggcgtggaattcgatcgagatcaacggccgggaaaagctggaggccttgatcgcgccgtggaggaaaaggcatgagctcctcctcgagcggggttaccggttcgtcccggcgacgcgcctggacctccggaaggaatggcccgcgctgcacggcctgatcgaccggtcgttcgacggttttcccgattacacgccgattccgttcaccgagttcaaagcgcttctttccggcgtgggattcgccctggccgcggacgtttcgggtttcgtttatgatcaagccgggcgggcggtcagcttcggcgtcatcttccgcgacctggccggcgcggtccgcgccatgaacggccggatcacgcccctaggcgcgctccgattcctgtcccgcctccggaagcgccggcgcttcaatttcttcgcggccggttcccttccggaagaagaagcgcgggggaccggggtgggaagagcgggattcttcgccatgatcgacgagtcgctccgccgcggttattcggacttcatcttcgcccaaatgcccaaggatcagcccatccaagcgttcttccgccggctgaagatcgaaccgcagcgagaatataccctgtacgagcgggaggcatgagccgcctggaggtccggtacgcccaatgctgggaggatccccgtctcagccgggaggcgcttgccgtcggaccggacgacgatgtcctgtccatcgcttccgggggagaaaacggcctggctttccttctcgatcggccgcgctcggtgaccttgatcgaccggaatccggcccagatacatctggtcgagctgaaggtcctggccgcccggcggctcgaccgcgaagagcttctgggctttctcggcgcccggcccggaccggacaaggaccgtttatacgacgtcctgaggccgggcttgagcgggccggcccgggctttttgggaccgccgacgggacctgatccgggacggcctgtttcactgcggccggtacgagcgtttcttccgggcggcgatccgttatgtcgttcccttgatccattcccgcaagacgctgcgagccttgctcgactgccccacggtcggggagcaggcggcgttttaccgggacgtctggaccaatcggcggtggcggacgctgttccgcctggtgttcggaaaacgcgtgttcggccggtggggtcgtcaacggtcccactaccgctacgtgaccgcggccgacacctggcggcttttctacgaccgggcggagcgggagctcagccaacgtctcgtccgggatcatcccggcctcgcttattttttcaaggagagcgcctacccccggccggagaatcttccgctatggctgcaagccgctcatttcccggcgatccgggagggattggaccggttgaagcttcggacggccggcctggatgaaatcctcgccgcgacccatcccggcgatttctcgaaattcaatctctccaacatctttgaatacatggcggccggggagtacgcaagggcgctcggcggaatccttcgcgtttcccggtccgggggacgcctcgccttctggacgatgttcgtcccccgccctgtcccttcatcgctttccgcgcgattcgccccggtcttcccggacggaagtccggatccggcctaccggacgtggaccttgtttgaggatttccacgcctggcgcctcctctgagtcccggagtccaagccgtttttcaagcagggaaaagccgcggcccggtttcctttccccgtcctattttccgccacatgacattgattctgcgccggtccgcggggctgaaaatcccccgctccaggagcaacccgaccagctcgacgaacgatccgccgtagacgcgccgggccagcgcgctgagaaggtcgccgaccgtttcgtccttgccgtacagggcggcatagaggtattcccggccggattttctccggctgagccagccgtaccgcacgaggcgggtcatttggacctggacggtggtccggcggaccttcttccgccgggcggcgttgagggcggtccagacgtcgttgatcgaggcttccggccgggcccatatttcccgcatgatttccaggctttcatccgacaggatctcgtgtctcatgacatcctccttttcgcggctgtttcctcttctcatagtacgacacttgtcgtttttatttcaatctattattttcataatattctcttgacaaccggtttttcgtgtgatatgagagacgcattctctatcggctttcgaggagtcatgtctttgacaattcggctcccggcctcgagaaaaccgccccttcaccggggaaagaccatcccctcgcctgatctttccgctccttctctccctttcataattttcattcctgactagcaaaaactccgaaggaggtttgacgcgtggatgtccaaattgaccgcgtgaacgcctttatccggaagcaccagaaccagaaaaaggccctgatcgcgatcctccaggacgtccaggcggagtacagcttcctgccccaggaggccctccggcaggtggcccgctccgtcggtctcccgctcatcgacgtcgtcggggtggccacgtttttccgggctttcagcctgaagccgcgcggccgccacgtcgtgacggtgtgctcgggaacggcctgccacgtccggggcgggcccaagatcctggaggaattcgagcggcagctcggcgtcggtccgggcgaaacaacgcccgaccgcaagttcaccctcgaaaccgtggcctgcctcggctgctgcgcgatcggaccggtcgtggtcgtcgacggcgacttccatgcccagacgtcgacccgcaaggtcgcggccatcatcaagcagtacgggaagaagtgagcctcatgagagtcgtcccgatcaaaacgctcgctgtcttggaacagacgatcgccgcccacgagcggcttcggaaaaaagaccggaggcctatcctgaccgtttcggccggcacctgcggccgggcccggggagccctcaaggtcgtcgacgctctccggacttccctccggaaggccaagctcgacaagaaagtccacctccaggtcaccggctgccacgggtactgcgaggccgagccgaacatcatcgtccaaccccacgacctgttctaccagaaggtcgatccgaaggacgcggccctcgtcgtctccgaaaccatccggaagaaaaaaccggtcccggagctgttcttccatcatcccgccaccgggaagccggcgaaacgggaaagagacatccccttttacgccaaacaaaagcggctggtcctgggcgacaacgcccggatcgatcccacctcgatcgacgattacttctccatcggcggttactccgccctggccaaggtcctgaggaagctcggtccggaagacatcatcgccgagatcaaggcctccggcctgaggggccgcggcggggccggcttccccaccgccctgaagtgggacctgacccgcaaacagcccggctccgtcaaatacgtcatctgcaacgccgacgagggcgatcccggggcttacatggaccgcagcctcttggagggcaatccgcaccgggtcctcgaaggcatcatgatcggggcgttcgccatcggggcgacggagggcgtcatctacgtccgggacgagtatcccttggccgtcaagcatgtgaccatcgccatcgaggccctccgcaagcgccgcctcctcggcccggacatcctgggcgccggcttctcctttgatttccggatcgtcaagggggcgggcgctttcgtctgcggcgaggaaacggccatgatcgcctcgatcgaaggccggacgggcgagccccgccagcgcccgccgtatccctcggtccgggggctcaacggcaagcccacggtcatcaacaatgtcgagacttggggcaacgtgccgatcatcatctccggcggcggggcggccttcgccaaggtcgggacgccgggcagcaagggcacgaagatcttctccctcgtcggaaagatcaacaacaccggcctggtcgaagtcccgatgggcctcgccctcaaggaaatcatctacgacatcgggggcggcatccccgggggccggcggttcaaggccgtccagacgggcggcccttcgggcggctgcctcccggccggcaagctcgacctgccgatcgattacgagggcctggccgcggccgggtcgatcatgggctcgggcggcatgatcgtcatggacgagaagacgtgcatggtcgacctggcccggtattttctcaacttcctccgcgacgagtcctgcggcaaatgcgtctcctgccgcgagggaacgcagaggatgtgggaaatcgtgtcccggatcgccgaaggccaaggccgggaggaggatatcggcaccctggaggacctggccgcggcctgccgggacgcttcgatgtgcgggctgggccagacggccgccaatccggtcctgtccaccctccgttacttcaaggacgaataccgccagcacatccggcggaagaaatgtccggcccaggtctgcaaggaaatcgtctcctccccctgccagtacgtctgtcccatcggccaagaagcctcgacgtacatcgccctcatcgcttccggccggtacgaagaagctttacgggtgatcatgaaggacaatccccttccctcggtctgcgcccgcgtctgccaccacccctgcgagctcgcctgccgggctggcgagtccggcgagccgatctcaatccgcggcctcaagcgcttcgtcgccgactgggcgggaaaaaacggaatccgttacgtcccgccgaagatcgaacagaaccgggagaagatcgccatcatcggctcggggccggccggcctcacggccggttattacctggccctgaagggattccggccgacgattttcgaggccttgtccgtcgccggcggcatgatggccgtcggaatccccgaccatcgcctccccgggccgctcgtccagagggaaatcgccgacatcaagaacgccggcgtcgagatccgcctgaacaagaccctcggccgggacatcaccatcgacgggctctttaagtccggctacaaggccgtttactgcgcgaccggggcggggaaatccctccggatgggcatccccggggaggacgccgaaggcgttcttcattccttggagtacctccgccaggtgaacatggggaaaacggtcccgatcggccaacgggtggtcgtcgtcggcggcggaaattcggccgtcgacgccgcccgggtcgccttgcgcgatcccgattgcgaaaaagtaaccatcttctaccgccggaccaaggccgagatgccggccatcgccgaggacgtcgaggcggccgtcgaggaaggggtggacatccgctttctcgtcaccccggtcaaggtcctgatgagcttcgggaaagcggtcgggatcgaatgccaaaagatgaagctgggcgagcccgacgcgagcggccggccgcggccggtgccggttgagggctcgaatttcgttcacaagctcgacaccctgatcctggccatcagtgaacggcccgacacgtcgtacatcggcgaaggcgacgagatcacccgccacggagaaaacatcgtcatcgacgcggaaacggccatgaccacccgggccggggtgttcgccggcggcgacgccgtgaccggcccgaacatggtcgtcgacgccatggccgcgggcaagcgggcggccgagatgatcgccaagtacgtcgagggcaaggccctcaagcctgattacaagctgtcccggccgtccctctacgccgcccctccggccttgtccgacgaggagattcagaaagcccgccgcccggcgatgaatcggctgtcgaccacggaccggaggaataatttccgggaagtggagctgggcttgaccgagcgggcggccgtccgggaagcccgccgctgcctccgctgcgacctggagaccgaggacggcaaggccgtccttaaggcgatgaaggagaagccatgatcccaatcctcatgaacggcttggaagttcaggcggaggagcactggaccgtcctggaggcggcccgcttctacggcctggagatcccgaccctctgctggatggagggtctcacgccgtggggcggctgccgcctctgcctggttgaaatcggagaaccgccgaaatcccgactcgtctcgtcctgcacctaccccgtcgaaaagggcctggccgtccgcaccgacacccggcgggtgatcgaagcccggcgggtgatgatcgagctcatgctctcgacggcgcccatgtccaagaagatccaggacctggcctccaagttcggcgtcacccagcagcgcttcccgccccgcaacgaggaatgcgtctactgcggcctctgcatccggatgtgcgacgagcagatggacgcccgggccatcggtttccagaaccggggctacaagcgcaaaatctcgacgccgttcgacatccgctcggaggagtgccggctgtgcggcggctgcctctacgtctgtccggcctgctccgcccggtgcggcggcccgaacgccgacaccgacatctgcaacgcctgcctgcagatcgagcccacctgcctcgaacaatacgacgagctgaattgctggatgtacgacgtcggacgatgcggctcctgcgtccaggaaaagaagcgttgacggagatcatctaaaggaggtcaccggtcatgtcattcaccagactcaatcggagcgcggcgacgctgacgaagaaccggacggaagggtcgatcagccccttcagcgggatgtgcgtcacgtgcgtggacggctgcatcgggatgtgcgaaatcgggaaatccgcctaccgggcggccgaggtcctttatccccagccgttcgggatcatcaccgccggctcggagaaggaatacccgttcgacctgtcccacttctcgatcatgggaacggccgccggggcttacggctgcgaggccgattcggacaaggcgacgttcgagaaggtctcgaccgaaacggccatcggccgggccaaggacatcaagctcaagctgcccttcatcgtcccgggcatgggctcgaccaacgtggctaagaacaactgggccgggatcgccatcggggcggccatcagcggggccgtcttgaccgtgggcgagaacgtctgcgggatggacgaggagtcggagatcaagaacggccgggtcgtccgctcgccggacatggagatgcgggtccggagcttccaggactggtcggacggctacggcgacgtcgtcgtccaggccaacatcgaggatggacggctcggcgtccaggaatacgccatcgagaaactcggcgtggaaacggtcgagcttaagtggggccagggggccaaggacatcggcggcgaggtcaagatcaagaacttgaaaaaggcccaggagctcaagcgacgcggatacatcgtcctgcccgaccccgaggaccccgacatcatcgcctccttcgaaaagggcagcttcagggaattcgagcgacactcccgcatgggcatggtcgaggaggagacgttcatgaagcgggtcgaggacttgcgccgggcgggagccaagcgcgtcttcctcaagaccggcgcctaccggccggccgacctggcccgggcggtcaagtacgcctccaaggccaagctcgacctgctgaccgtcgacggggccggcggcggaacgggcatgagcccctggcggatgatgaacgagtggggcgtcccctcggtcgagctctggagcctgacccaccaattcgctaagaagctggacaagaagggcgagtacgtcccggacatctgcttcgccggcggggtcaccttcgaagaccagatcttcaaggccctggccctgggggccccctatgtcaaggcggtgggcatggcccggagcgtcgtggccgcggccatggtcggcaagaccatcggcaagcgcgtcgacgagggccagatcccggtctacgtcgagcggttcgggagctccgtggacgaaatcttcgtcaccgcgccggagctgaaacggcgtttcggcaagcgctacgccgacctgccgcccggggccatgggggtctacagctacttcgcccggctgagccagggcctgcggcagctgatggccggcaaccgcaagttcgggctgtcctacatcacccgggacgacatcgcggccctgaccaaggaagcctccgacatcagcggcatcccttatgtcctcgacaccgacaaggacgaggtcgaaaagatcctcaagggttgatcgttattcaaaaccgtctcggcgtcgccagccgggcggggaacccggcggcgccggccgacgacttatgatcgccggggacgaagacatccgcccggccttgaatcgcggccgcgacaagcagtcgatccgccggatcccgggcggaaagagcggtccgagattccggaaaacgaggaaaatcccgcctccttgagaaaagagaatttccgcaaagaaacgcgaaggccggggcatctacggccccgaggggaggagtccacttttaatgtttacgtgacagggattttcaggccgttgactcggccggttccaggcgataaaatcgctttccggtctaaggacgaaatcatcgatccatgagaacgaatacgccggcggggaacggtcgttccgccgcggcggcatttccatctcccctgaggaggaccccatgaaatccttagtcgcctgttttgtgtccgcgattttgttcctggccgtctcggcccaggccgcgccggaaagccggctgctccgcgagcccgatatctcggcgacgcggatcgtcttcgcttacggcggcgatctctggacggttccccgcacgggaggggacgccgtgcggctgacgtcctttccgggagtggaaagcaacccgagcttttcgcccgacggaaatctggtggccttctccgcggcttacgacggaaacaccgacgtctacgtggttccgtccgccggcggcgagccccgccgccttacctggcatccgggcgaggatctcgtccgcggctggacgcccgatggcggccgggtgctgttcgcctcgggacgaaccggagccccgctctcgtacccgaaactatggacggtcgccctggggggaggaatgcccgagccgctgccccttccgcgggtctttaagggtgccttttcccccgacggccggcggatggcctaccagatgatcgagccgtgggagtccgagttccgcaactaccgcggcggccagaacaatcccctccgcctcatcgacctggagacgttggaggaagagaagcttccctgggacggagcgaacgacaacacaccggtttggctcggcgatacggtctatttcctgtcggaccgcgactacgccatgaatgtctgggcctgcgacctcgccgcccgggaggtccgtcagatcacccacttcacggacttcgacgccaagcagatcgccggcgacggcggcaccctggtgatcgagcagggcggcggtctccacaccctggacctcgccgacggcacgctcgaaaaaatcgccgtgtccgtccggggcgatttcgcctgggcccgcccccactggatcaaggccggagagaggctgaccgagccggctttatcccccacggggaaacgggccgtcttcagcgcccggggcgaaatcctcagcgttccggccgagaagggcgatccccggaatctcagcggagatccggccgcggccgaccgcagcccggcctggtcgccggacggggaaaagatcgcctggttctcggacgcctcgggcgaataccagctggtgatcgccgatcaaaaaggcgaaaacaggtcggttatccccctgcccaaaccgacctttttctactctccggcctggtcgccggattcctcctcgatcgccttcaccgacgccaaccgcgatctctggatcgcccgggtcgcctccaaggcgatcacccgcgtcgacaccgagggcttcgcccatcccgagcggatcatcttcccctgctggtcccccgattcgaaatggctcgcctatgccaagcggctccgcaacgaatacggggcgatcttcgtctattccgtggacaagggaacggcgacggccgtgaccgacggcatgtcggactgccggatgccggtctgggacgcctccggcaaatacctgtatttcctcgcctccaccgactacggtctcaacgtcggctggctcgacctgtcttctttcgagcgtccgatcacccggagcctttacgccgtcgttttggccaaggacggccctgatccgctcgccctcgaaagcgacgaggaagccgcggccaaggcggaggacaagggcccggccggcaaaaagccgggcaagaataaagccgaagccgccggggacgcggataaggggaaggacaaggccgttccggccgtgaacatcgatttcgacggtctcgcccggcgcatcgtcccgcttcccgtcaaggcccgcgattaccggctgctggcgggcggcgaggcgggaacgcttttcctcggcgagctgattcccggagaggaaagccttctcgtccaccgctgggacgccaaggagcggaaaaccaaggaatacctgagcggcgtgtccgacctcgccgtctcggccgacggcaagaaagtcttgtacggcctggacggcaagacttggggaatcgtcgacgcgtccggatcgcccaagccgggcgacggcaagatcgccgccggcgacctccgcctctatgtcgatccggcggccgagggccggcagatcttcaaggaagcctggcgcttccaacgggattatttctacgtccgcaacgtccacggggccgatctcgacggcctttaccgggcctacgccccctgggtcgagcacgtccggcaccgggccgatctcaactatcttctcgacatcctcggcggcgagacctccatcgggcattcgtttgtcggcggcggggacatgcccgccgtggaatccgtccccgtcggcctgctgggcgccgacttcaccctcgactccggacgctacaagatcgcccggatctatacgggggaaagctggaatcccaacctgaaggccccgctggccggaccgggaatcgacgtcaaggaaggcgactacctgctcgccgtcaacggccgcgagatcgagatcggccggagcctcttcagctacttcgagcggacggccggcgtccaaacccggatcaaagtcaacgccaagccggagccggccggggcccgggaaatcacggtggttccggtccgcagcgaggaggccctccgccgggccggctggatcgaggacaaccgccggcgggtcgacgccttgtccggaggcaagctggcctatgtctggctgccggacacggccgatggcgcttacatcaacttcaaccgttactttttcgcccaaaaggataagaagggcgcggtgatcgacgagcgctggaaccagggcggccaaatcgccgattacgtcatcgacctcctggcccggccgcttctcggctatttcaacaacccgatcggcgacaagcagccctggacggcgcccaacgccgcgatcttcggccccaaggtgatgatcatcaacgacgcggccggttccggcggagacatgatgccctacatgttcaaggagcggggcatcggcccgctggtgggcacccggacgtggggcgggctcgtcggaatctgggatgtgccggctcttatcgatggcgggcggatcaccgccccccgcggaggcttctacaacacggccggggaatgggacgtggagaacaagggcgtcgcccccgacatcgaagtcgaaatgagcgcgaaaagcatagccgccggcggagatccccaattggaaaaagccgtggaggcggccatggaagcgctcaagaccggcgaggtcaagctcctgccccagcctcccgatccggtccgcgttctccggccgcgccgctaaggcgccggccggatcgccgcgggcccggcggcgccgggaccgtccttttcagcaaaggagaagtgctgctggacgatcacccagcggccgtcccgtttctccaggaccccggtccagcgggtgttctcccagttggccggcttccccttccaggtgttgatgtcgtcgaggatgccgaaaaaccaggccgtatcgccggacttcgagatcgtgatctttagatcgcggatgtcgcagcggacggccttgaaatcggggctgccccagacggcctcggctctcttgaattcctcgattcccttgacgacccggccgtccggatgcacctcgaggaaatcagcatcgccggcaatgacgcggtagagcaggccgaaatccttggtttgggcccagccgacggccgcccggatggagcgctcgatttccgcccgcgcgccgccgcccggcgtttgttcggccggtttcggccgggcctcctcgatgacgccggcccgaacccagtagacgtggctttcgccgtcccgctggctcaagaagaaaagataccggctgtcggcggtgacaatgggacagagctcgatggaaggactgttgacgtccggcccgagattgaccggcgcggaccaggcgccaccgtcctcccggaagctcgcccaaaggtcgtaatcgcgggaaaagatcagatagctcccgtccggggcgacaaaaggcgtggtttccggtccgggcgagttgatcgagccgcccaggttcaccggcgcctcgtattttccgccggtccgacgggcgaaataaatgtccgtcatccccgaggaatcggctccctcccccgcgaagtaaacattcccggatttgtccaaggagaattcccaatgcatattgtgagcgttgacggccgggtcgagaaaccggggctcggaccaaccgccgcccggcgtcctgtcggccagccaaatcctctcccccggggccgccgtttccccggggagaaggcgccgggagaggaaatagatcgtttgtccctcaggtgagaaaaacggaacgtcgtcgtcatcgccgggacgggagaaagcagcgggagccggagcggaccagcgcccgtcgacgcgcttcatcatgagcaggccgccccgggaatacgcctcgcccggataagtcaccatcggcgcccaataaacctcgtttccgtccggggaaaacacggccgtgctgtggaggccccagatcgaggagatgacacccagaccgaacagctccgccttgccggcgggaggtttttgcccgaggtaatctccttccaggacagggaaccggacgccggacgtgtcagccccggcctcggccaaaaggccggccacggccgaagcccccctctcccgggcgacgtcgtaggccgtttggccggcggccgtccgggcatccaggggaatctttctttcgatgagaatccgggcggcgccggtccggccgtcccgggcggcgtaatgaagcggcgtccagccgaagcggtcggggcgggcgggatcgaatccgttttcgagaaggagggcgatgatgacatccgaaccaccggccgcggccatatgaaggagctccgtcccggaaggatcgacggccttcagatcttttccgggaccggcgaggcggcggaataaattcgtcaacccctgggaagccgccaaggagatcccctgcccccatttccgcccctggtccggaaccggggcgcccttttcgagaagaaggtcgacgaaatcggctttgcccctccaggccgccaatcccagggcgtcatcgccgaacttgtccacggcctcgatgtccgccccggccttgaggagaatccgcgccgtcgccgccccgccgcgttcccgggcgcagaggacgagcgccgtcctctcgtagctgtcccgggcttcgagggccgcgccccgccggagaagttccgccacgacctcccgccgatcgttcatggccgcccgatgaaggggcgtttttcgggacgcgtcctcggcctcaaccgccgcgcccttttcgatgagataggcgacaagggcggcatctccggccgaagcggcataatgaagaggggtccagccgttgtcgtcccggcgattgaccgtctcgggcgttctttcgatcaacgccttgacggctgaaacgtcccctttgcgaagcaggtcgaagacgtcctgggcgaaggcgacggcggtcgaggccgcgaaaaacgaaagaatcagagcgagctttctcatgggccctcctcgcaaaacgaccttgtccttcgttttgcaatcttcaggccaaatctcctctcgagacgcccgccgtccctggtaaagccgttttaccacgtctcgaaatttactttacagcctggatcaaaaggagccgacttcggctgaaaggccgccatgacggcttgtcaaccgggaaaaaccgcgggctcagaacgaaaaggaccgcgtgttcttcatccgcaggtcgatgcggccgatgccggcttcgatcgcgaggtccagagaggccccggttttcccccaggcctcgtttcggaacgtctcgccgtccttgatgaagcccggcgcatggatcgagccgagcccgccttcgatccggagccggacgccgatatcggacggcaggaggatttcagcccggccgattccgccctcgatctgtccggtcaggccctcgttccgcgccccggaaagatcgaggtccatgccgcccacgcccacctggacatcgagcttggtgacggggacgccgtccaggtcgattctggcttttccgacgccgaggtccagccgcagctccgtcgggatcttccgggacagctccacgttccaattgttccggacgcggccgaacgccgggcccatccggcgctgttcgaccacaaggcgggagacgccgccggagacttggtaatcgatccggggttcccacggccgccggttgtagtaaaaagatcctttcatcaactcgccgcccgcgcccccgcggacgtccagctcaccggcggccattttgatcgtgacgacggcccggctttcgccttgggaggggatcgtccggtgggtttccagcttcggctccgggcgtctctcccggcaggcggcgccaatcaggctaaaggcgaaaacaaggatcaaaatcccgggaaaacgggcggcgcgcatgggaaacctcctctgcttgatgtcgctattatatacggaaagggagtgcgaggggttcacggcgggaccggcggcggagggaccttgggctgatatcgaccagaaggctcttccctccgccggagaccaggaagacgttgcttcggccggctaaagcgcgggtgatccgggttttctttccggccgtccatgttttcatgataagaagagaaggctcacgcgccgttttttcccgccgggacgagataaggacaggcccggccctcggccgcgtaggcacagtccccggcgcatggctccatgtggacgacgatttcgctctcgggaatggaggcggccaagtcgtttttcagatccgcggcatggccatgggcttttttaatcgaaagaccggccggcaggatcagggtcaggtcgacgaactgcctccggcccgccgtcctcgtccggatattcgcgaaatcgcagaaaacgccgtaatgacgggccagggctttcatgatatccatctgcccggcttcctcgatggacgcgtccaacagcttcatgaacgcctcccgcagaagccggacggcctcgacccggccggagtcgccggcggccaggacgaggaactctttctcgagggcttcgtcgcgggcgacgatctcctcgtggctttcgctcatcgggaaatgacgcgggaaatccggcaaaaagcgcatcgggcgcctcgagatggatcatctcgtcgccccgatgtgtcgccgcatccttcccggccaaccccccgaaggcgcgggccagggcctggtggccgtaacagacgccgagaagcggccgccggttggttcgaaggaaatcgagcaggccggcctcgacctgtccccggccgatcatttggcgcgatccggagacgatcaggccgtcgtaatccccgccgggaagcggcccgaggtcgaacttcgcgagaatttcaagcttcaggcccaagtctctcgccccggcttgaatccattcccggtagggatcgatcttcttcgccgcgttttcccggtaacagttgaccagcagcagccgggccgtcatcggccggtccttgcctccggaccgcccgtcggcccggtccggggattaaagcaatcccgcatcgcctgtttcctcgccccggcccttcgtcggatcgcagaggaagccgagggccgtctcccgatcgccgtccatgatcacccgcagctcccggccgtcggccgtctcaggcacgtcgatcacccgaagcaccggggccaggtacgcgtattccggcaggtagcgggtcaggacattcggtgatttgcggaaaaagtcccaggcgaaaatcacatcccggtcgtcgggatagagagccaaatagcggatccgggcctcgaccaagtcttggaagaagtgcgttccgaaggacaattcgggcacgtattcgccgaccttccgggcgatttcaaccagcatggccgaattattgatgtccgaataggcgacccgcacgcccagccggatatccccccggctgccccaccggcccggccccatcaggatgaaggatttccggggcaggaaggaattgagccgggaaaccgcgtcgccgacggctcccatgtcggccagggaggcgatccggccgtatccctcgggatcgacgtagacgatcgtccgaatgccccggacatcggcgttggtgatgtatttcctggccgaaaacagcttgccttcgtcggggatcatggccgggatggcgatcgcttcctcgtcgtccagacggctctgcggccggcactggaggatgtagagatcccggccgtcatgggcgaactcgacgtccatcgggatcccgaagatctccttcaggacgcgcatgatttcccgcatctggagaaggaacggcgtcccggtcaaaagaccatcgaacgtggcgacgacggaatcctggtcaggctggtccaagacccggttggcccggcggacggactggccgtcccagaccgaaaagaggcggtcccagatggggaaatccgcgccgatttccttgaggagctcctcgatcgcatgcgtctcgaagcggcgggtttccaggttgatgacgtcgatcgccttctgggaataatgaatcacctggtcgggcatgacgttgacccggatgcccggctggccggggctgaccagcagggggtaatcattgccgacccggtcgacggcccgggtccccagaccggtcaccaaccgcagcacgccgtcctcccgcttgatccggggcgaccagcggaactcgttgttgttgaaggccacgccggagaacgccgggaagaaatactttccgacccgcgtccccacgacctgctggatgaggacgcccatttcctcgtagtaatccagcaggccccgctccgcccggtattcgatcgcgtcggggttgaaaatggaggcatagacctcggccacggcgtcggtcagggcgtccagccgctcctccttcgtccccgtgttggccagaaaaaggctccggtacttgccggagaacgccgatccccggctgtcctcgagcaagctggaggaccggacgatcagcggatccccgccggcgtcgtcgagaatgagcttgagctgggcgagcatgtcgggcgaaaagaaagactgcttgcagacctggaccaggtaggggtagttgtggcggatctcctcgatcggacggaacttgaagctctggaaatcctccaagtagttataatggatgaaatccatcaccccgtcggacgtgatgaaccaggactccgggatcttgatcgtcccgacggccgggtcggactgggctttctggcggaggatatgctcggccaggatcatgcccgcggatttcccccccagcttcccggtgcccgaggtcgggccgaagacgcggggcagcagccgcccgaaatcgtggatggtcatgaaatcgcgggcgatccggatgaagggaagacgctcgctgaggaagcggcggatgagggcgatccgggcttggaggtcgtcggccggagagagggactgttcgtcctcgcccgtcgagcggcagaaccggttgaggatctccttgatctcaacgacggaaatctcccgcttttccgtggccaccatgaaaaagccgagcttgtcctgccgcatccactgcttgaggaggtccgaaagctcggcgtccgtcagggccagggaggcgatccaaagggcttcctcgaagaccttgctcaggcgttcgacgctttggacgggctggggctggttttcatcgggtccggcctcggcccgggagtaagattccggggtcaggtggaacagcaacccttggacgccggggatgccctgccagtggagatggttcatcagccgccggagaacccgccggtagagcatcggatcggtctctctcaagagatccatgatcacccgccattcgggttttcgttttccggggaattcctcggcgggtccggccgcggccgcccggccggcgccttcgccctcctcgatcaagcggccgagccggttgccgatcaggtcgatgagcttcttctcctcgaggaggaaggcgttttcctggggggagccgcccgggccggtgtagcagacttccagcgccccgatcgtctccccgcgggcccggagggggacgcgctgcatccagggcgtctcgacgaatccaggggtgtgaaaaaccgccttatggatcttgatccgggcccggcaccgctccggatgctgccagccggaggggatgacgtcgacgatccgctggagcatcttgtccgaggacaggccgggcgtttcgatgacggtgacgatggcctggaggcactccaactccttgacccgctcccgcagcgggcctttggggacgtccgactcgcgaaggctcatgcctcacctccccgaaaaaaaagcggccccgccttcgggggcggggccgcgcagcgatctaggaaaaacgacgggacgccggaatcatacccagccgcgcttgtggctggcctcggcgacacgcgtcaccgcgatcaagtaagcggcatcgcgcatataaatgttctttttccgggccagctcggagacggccttgaaggcgaccgtcattttttcgtccagcttggagaggacttcatcctggggccagaaatagttcatgttgcactgaacctgctcgaaatagctgcaggtcacgccgccggcgttgcagaggaagtcggggatcacgaaaatgccgcgcttgatgatctcggcgtcggcgtcgggcgtcgtcgggccgttggccgcctcggcgatgatccggactcgcttgtggatcttgccgacattggccgcggtgatttggttttccaaagccgccggcacgagaaggtccgcttcctgctcgatccaggcatcgcccgggaggatctcatagccggcctgacgggccttggccttgtcgatggttccgaacttgtcggtgatggccacgagctcgtcggggtcgatgccgctttcccgccggaaggtgtaggacgtctggtcggcttggtcccagcaggcgacgcagatcggcttgccgccgtattccttgaaaagcttgacggcgtgctgggcgacgttgccgaagccctggaaagcgccgaccgctttcttaatgtcgatgccgagctccttcatcgcttcccggacggtaaagatcacgccgaagccggtggcttccttccgtccgagcgaacctcccatgccgacgggcttgccggtgatgaaaccggggaacttggccccgcggatgcgctcgaactcgtccatcatccagagcatgtgctggccgtgggtcatgacatcgggcgccggaatatcctgctcgtggcccatgttgaaagcaagctggcggacccagccgcggcagatgccttcctgctcccggtcgctgaggttgtgcgggtcgcagatgacgccgcctttgcccccgcccagggggatgtcgacgacggcggttttccagctcatccacatcgccagggcccgaacggtgtcgacggtctcatgggggtgaaaacggacgccgcccttgcagggaccgcgggcgtcgctgtgctgaacccggtatccccggaaaaccttggtgctcccatcgtccatgcggacagggatcaggacatggtattcgcgcagggggttgcggagcagttcgcgggtcgcctggtccaggccgagcttatcggccgccgcgtcgaattgtttctgagccatctcgaaagcgttgaagggtttctccatcgggtctcctcctatgatgatgaaagtgagatgatgacggtctttccccctgatgttcggttctcgtcaaggcgaaattttccgtttcagggagtcattgattctagcttttcagggcggataagtcaaatcgccgccaccgccgtgtcgaagccgggaaagcccccggtgaagcgcaaaaagcggccgtggcgggcgaaatgccgagtcgtcaatccgccggctgaagagaatcgcgaggatcgtcctttggcgacgatcccctcgggcggacgcgtccttttttctcccaatacggatcatcgttttgagtccgaaaaagaaatccgtcgcccgaatgaaaagttgatcgcccggggacggggattccataaatccggcatgaacgtcatcggcctcgcgaatctcgataaagagcgtttcccgtttgtctgggaaaggcgggatcaatccgcaatccaacgaggcgccggccttcttgtatccgtcggattcctttggtataaatttttattggatatgatccccgaagggaagatgcgccgccgtactgatcatggcggcctcggccgcttatgtcccggcggtcggcgaaagccccgatgacgaatcattcaaaaagctccaggaaacggccgatgaataaatccgcgtctcccaaggtcgacgtttcgccctatgtcggcttctgcggcggggtcaaccggactctcaaaatcattgaaaagctccggctcgagcagccggggaaaaagatttatcttctgggcaaggtcgtccataacgaaatcgtcctcaaccggatgaaacgccgcggattcaagaccatcgacgaccaccgcttggccggggacggcctgctgatcatccagagccatgggataccagcctctcgtttgagcgagatcaaggcctcgggcatctccttcgtcgacacgacttgccccatggtcaaggatatccaagcccgggcccggcggctggccggcgaaggccgccgcgtcatcatcatcggcgaccgccggcacgaagaagtccagggaatcgccgggcaggtcgaaaacgctctcatcctgggcacgccggaggaagccggccggggatttttccggggcgtcgaccgggccggagtggtcatccagtcgacgttcatccgggccgaggccgacgccatcctgaggaaaatccgccgtttcgtccccgacgtccggttcgaaaacacgatctgcaaaccgacctcagaccgccagcgggacgcccgcatccaagccgcccgctatgacggcgtcatcgtcatcggctccccggccagcgccaacacccgcaacctgatgtcgatcgccggcgcggggaaccggcggacccgcctggtcagccggccggaggacgtcgacggtcttccgctcggacaaggccggaagttctatgttctgtcgggggctagcacgccgatggacgtcatcgaccggaccgtcgcccggctccggcgccgcttggagagggagacaaaaagccgatgaccggatcaacattggatcgcgatttcgaaaagagccggaagcggatcgcgcgatgcctctcgcgctatttcgacggccgggcggctggcttggccgcggtcaacgcctggggcgcggatttcacccggcgcatccggccgttcgtcctcggcgggaaaatgatccgcggcggcctgatcctgatcgcccatgaccggctcggcggaaaagccggcccggacgcggttaaggcggccgcggccatggagcttttccactcggccttcctcatccatgacgacatcatggacgatgatccgctccgccgcggaaagccgagcatccatgtccaatacgcggcccaggcccggcggaagggcgtaaacgacgccccgggcttcggccgggcggccgccctgtgcgccggcgacgtgctgattttcatgggcctggagatcctcgcctctctggccgctcccgccccggataaagcccgggttctctcgctgttcggccgcgagctggcccatgtcggtccggcccaggtccaggacgtctattccggccggatccgccggcccgtatcccgagccggcatctaccgcctctatgccttcaagaccgcccggtacacctattcgctgccgctcgcggccggagccatcttggccggcgccggacagagcgcgatccggggtctcgaagacatcggcctcgatttggggctcgttttccagatcaaggacgacgagatcggcatgttcggcagtccctcaaccacgggaaaacccgtcggctccgacgtgggggaagggaaaaagaccctttattatttttacttgagccgggcccgtggaccccgggccgccgccctgttcggaaaacgccgccccgcggccggggatatctcccgcctcaacgcccttctccggaccgaaaagatcccggaacggatcgaggcggatgtccgccggatcgccggacgctgcgcccggcggatccgggaggcctcgcttccttcgtcgatgaaaaccgccctctcggagctgctcgcctcgagcctcaaacggaaagcctgaaccgggcggcgttcttctccgccgaagccgcggacgtcccgaggcggagcacgggacggcgggaagcaagcctgctataatatttcctggagagaaaaaccatgaaggaaacgacgtacgtttgccccgcctgcggggccaaggcctcggccccgacctcggcgtccgttccaacctgctgcggatcggccatgacgcccgagccccttcccgtctgcacggtccccgtttccgccgaatcggcccgaacgggcgacgaggacggtccctgcgccgacggagccacgccgcgcaaatcataattccaggcaatccggccttcaagacgggccctcgcgcgcccggaaggacgcagcggaccccgccgatgatcttcgggacgttttcggccacggccggatcatccctcggaaaatcattccggccgtcgccccggctcggacaacaatcggacatagctgccgtccggctgagccggcggcccatctgtttcggcggcgtgatcatgtcctgccttcgacgtcctcttcctggaagcgggtccccttgatccagttgccttgacaaaccggcgacccggcttggcgaagccggtcgaatgcagtatgcttgccgcatgcgcgcgccctttgatatcgccgttgtcggcgggggggcgtccggcttgacggcggcgatcgccgcctcccgggaaggccgctcggtcgcgatcgtcgaccggatgccccgcctgggaaaaaagatcttgatcacgggcggaggacggtgcaacctcggcaacgagcgcctggatccgggcctctttcattcgacgaaccccggcctcgtcgcctcggtcctggcccgtttcggaacccgggagatcgtctcgtttttcgaagggctcggcctccggatcgtgtccgacggagaccgtctctacccggcgaccaatcaggccgcctcggtgcttaaggtcctggaaatggaggtccgccgccggagggtgagcgtcatcccgggattcgaggccgtttccatcatccggagcgcagaggcctcgcgcgcggccgcatccgacggccggacgatcgaggcccgggcgttcatcctggccgggggaggccggtcctatcccgccctcgggtcggacggcagcgcctacgccctggcccggaccgccggccatcgcctgattgagcccgttcccagctgcgtccccctcctcgtccgggacccctggtgccactttctccagggccagagagtccgggcccaagcggaagcctggatcgacgggcggcgggcggccgaggcgcttggggacgtcctcttcaccgcctacggcctttccggaacggccgttctcgacgtcagcacggacatttcaatcgctcttcatcgggggaaaaaggcccgagccgaagtcgtcctggacttgctcccggacatgagcgccgaagccctgtccgccgagctcgcccgccgcttggagggcgggtggggagcggcggatctcgtttccggcctcctgccggaaaaattcggccggaccatcgccggcttgatctccggcggccccccccgtccggcccgaacggcggccgctctcgccgcggtccttaaaggcaagcggttcgccgttcagggaacccggggctggaacgaggccgaattcacgagcggcggagtggatgcgggggaaatcgaccgggagaggctgtcctcgaaaaaagcgcccggactctatttcgccggggaaattctcgacgtccagggaccgcgcggaggattcaatctctcctgggcttgggcctcggggacattggccggccgggcggccgccggggaaaccggttgaaagaggagaagaagacggcttaggcttttcccaggaccatggccagcagggccatgcggacgtaaagaccgtattccatctggcggaaataggccgcccgcggatcgtcgtcgaagtccaagctgatctcggtgacgcgcggcagggggtgaaggacgatcatggttttgccggccgctttcatcaccgcgggatttacaacaaagacgttcttgaccttttcataagcctggggatcctcgaaccgctctctttggacccgggtgacgtagaggacatcggtttcgggcagaaccttgtccagggttgagtgttcggattgaggaagccccttggccgccacctcttccatgacgtcgggcggcatgcggaggatgtcgggggaaacgtaattcagcttgatcccgttgaactgggtcaggagccgggccaaagaatggaccgtccgcccgtatttcaaatccccgagcatcgtcacgttgaggttgtccagacgccccagctcctcgcggatcgtgaacgtgtccagcagggcctgggtcgggtgctctcccgccccgtcgccggcgttgatgaccggcttgccggcatacttggcggccagggcggccgcgccgatttcgggatgccgcaagacgatcacgtcggcatagcagcccagggtgcggacggtgtccgggaggctctcccccttggccaccgacgaaaatttcacttcgctgatggggataacggccccgcccaggcgctccatggcggccatgaacgacgaggaggttcgagtggacggttcgtaaaacaggttggccaggatttttcccttcagcaggttgaacgtgccgacccgctcgaccatcgtcctcatctcgtgggcgacactgaagatatattccaggtcgttgcggcagaactgcttgacggagaggatattcttcccgtaccagggggcggtctgttgatccccgaacggaaggtggggattcttcggcttgctgggcatgacggctccttgctcgcgcttcacgatagcgcggaaccggggttcatgtcaaaggaaaagcgaaggccgcgggcggcgtcccggccgaatgacgggacgcgcgcggccgatagaggcgtccgaatgaaaccgaaaggccttccgtcccaggcgggccgaaaggacgcgagaagggacgggaaacgcggaaacggttgaggacgtcagtcccgggggatgatgggatcgggatcttcctccggggcgggctgctccgccgcggtttcggctgaagcgacctgttcctcggcggctcctccggatttcaccgccatccggcgccgccgtttctcttcccgcttgcgcaggcggtcgagctccttgcttcgtttggcgcttttataagcgcggctgcttttcgccattactcctcctttccgccggtctcggaagacgcgcccggcggcaaataaaaaaaagggcggttcccaagaaccgcccttcgttgtcttagggacatccggcccggggcccgggccggaacgacatcgacaaaaccggaatcagaagcgccggccgccgccgaagccgccgcgtccgccgcctcccgtccgggggcgatcagtccggggcttcgcctcgttgaccgtcatcgtccggcctttgaggtccttgccgttcagggcggcaatggccttctcggcctcttccttggtcggcatctcaacaaagccgaagccgcgggattcacccgagaacttgtccttgatgatcgacgcggtcgcgacctggccgtaagcggcgaacgcttcgcgcagatcggtttcgcttacactgaaagaaaggttgccaacatagatattcatactcgtctcctttgacgagggctccgtccgggtggcactccggacgtcccttggatttgttcgaataaaggagaggagtatacagccgaacagggcccgtgccccttccttttttcgacgctaatatcataaacagaaaaaaaataaaagcaagcgatttttttgggcttgaaacaagtcttttcgccgagcgctcaccagccggcgccgggcttctttccgccggttttggccgactcggccgcgaccgcggcgataaccgccgctcccaatcccgatccgtcccgcatcggggcgagagcgatgcggcccccccggcccccgaacagctcccggagcgtttcctccatcctggccttgaatccgggatatttatgaaaaacacttccgtcgacggcgatcgagtgtttcgcctccaaggccgggtcgtttttcgtcaccgtcgcccccagcgtcgcggccgccaaccgcgccgcccggccggagacggcccggacgacatcccgcagaagccgggcgtccccggcggccgccggacgggctccccaatcccaaaggaactcccggacgccgtcggccgaagccgaatcgtccttctcgatctccgagaggcgttcgcttccaaacgcctcccgccgggaaaagatttccggaagccgtccgccgaacaaccggccgcggccgcacagctcgacgacggccagacgggccagctcgccgaggtattttccggaaaccattttttcctccgcctgaagcccgggattcgccgaggagcggtccaagaggacgtcgaagcggttgcggggcaggacggcgttgaaattcccggattccatgttgatgatcatgtgatcccggccgtgcgggccgacgggcttgcggatttccgaggtccgttcgcggtagcatatgttcgtcccggttccaagaatgcatccggcgtcgcaatccggatcgaggtaggcccgggccatcaacgtcccggtcgtatcgttattcagggatacaacccggacgccggagatcctttcggcggccaaggcccggttgagcagggcggcgacgtctcggccgacgacgccttcggccgtccaccccttggtccaggcgatcaactcgccgccggcgatcgacgcctggcggagggggaaggaaaaggtgaagcccagggggagccggccggagagtctccgctcccggagaaaccggccgatgaaccgggccagcgccccgaagaggacggagccgtcggccgtcaccttgtcccggctcaacacaaaccgatcttcggcgcagacggggagacgtccgtctcccggaagatccacctgaagaacgcggacattggttccgccgaggtccagggccaggaacgtcccccgctcgcggcccgtggggcggtcgacataagccggaagcatccgcagggaggacagcttgccgttcaagccccggcgcatctcgccgcggaaggcctccatcatgatccgcagccgggccgtcgatacggcaaacgtccggcgcatccgggctccttcgtccatcctccttgtcgaagacatcatgccgcctattatatgcgcggccgcccggccgcgccagccgtcggacggggaaatttcgtccgagggttgatattcatttcgatgtagagtatattttccgccgtcttataattcacccggtgaaaggaaggaccatgccgaagaaacctatgaccaaaagccaaatcgtcgcccacttcgccgagaagttcgagatgccccggaaagccgcgggcgaattcctcgaggaactcgtcgatttggccatcgccgaaaccaagaaagccggaagctttacgcttcccgggctcggcaagctcgtcctggtgaagcgcaacgcccgcgtcggacgcaatccggccaccggcgcgacgatcaacatcccggccaagaccgtcgtgaaaatgcggatcgccaagacggccaaggacgcgatcgtccccccgaaacagtaaccacggccgcctcctgaggattgttccgggcgcacgttgaccggcgtccggaagccccgttccgccgttcggcccatcgaagaagctggacggcgagacggggcttttttttcccaagccgcgagaactctgtggcgccggccggctgaacatggtaaaatctttcggcatgttcaaggcttccgatctcaaaaaaaacaacgtcgttaaaatcgagggcgacccctgcctcgtcgaaaccgtcaacgtccagaagccgagcgcccgcggggccgcgaccctctataagttccgcttccgcaacgcccggaccaagaggaaaaccgacgtgaccgtccggggagacgaccttttcgacgaggccgagctggagcgccggcccgtccaagtcctttacggcgacgccttgagcttctctttcatggatttggaggatttcagccaattcaccctggccaaggaagagatcgaggaggagtggccttacctcacagaggggctggagggcgtcttggccttgtcctccgaaggccggatcctggggctcgagctcccgacgctcgtcacccttccaatcgtcgagacccgcccctcggtcaagggcggctcggtgacggcccggacgaagccggccgtcctgtcgacgggcatggccgtccaagtgcccgagtatcttgaaaccggcgatttgatccgcgtggacacgcgcacgggtctctacgcctccaaagcctgatgttcaaaccggaagaaatcatattcgcgcccacggccgactgtaatctcgcttgcccccattgccgggtcacccggatccccgaccgcctggaagcgcgcgacgccgtcgccttcatgaaatcgtgccgggccgccggcctggagcgcgtcggtttcagcggcggcgagcctttcctccgtccggatttcctcaacgaagtctcgcgggcggccgtcgagatggacatgctcttcgggcggttgatgaccaacggcgtctggttcgactcgcccgatcatctccgccggactctgaccgggctgcgggaagccgggttcgacgggaaattcggagtcagcatcgacgcttaccatgaccaggacatccgggatctgacgctctttttcgagaccgtcttctccgtctggggccggcgggatggctgtgaaatcgtcacggtcatcccccccgacggggccgagcctcgggagaccttcgaaagactggccgaacggttcgacggacggctgatcatcgacgagggaatcccctattcgatcgtcaacgacgcgttcatgaatccccgggagacggcagacggcccgtttgaggccctggcgatcgacatcatccgggtcccctattcggccccggccgaggaaaacgcctggaccgcggaacactggttcgaagacgacttctgccggggacccggaaacgttttttacgtccatccggacggggcggtcgccgtctgctgcggattcgccaatgaaaacggcggcttgatcatcggccgcatcccggccgacgggtatcggcagcttctccgccgggcccaagccagccccgtcgtccgagcttgcttcgacacgggcctggcgaccatccgggagcttcttgaagcccagggatcatcgtttccgggcaaaacggaagaccgctgctttttctgcgattacctggcgaaacacgattttccgattccgaagcaacggaaccgttagacccggcggacgacggccgcgccctggatcgccgcctccatcagcttgaggagcgcctgccggtcgaacgccgcggcggacggccaagacgcggcggctagaacatccggaaccgaggggggaagaaggcgcgaggggacgatcaggggcttgaccgggggggcggaaacgcccttgagagggatgcggtaagaccggccggcccggatcatcgacgacgacaagccgttggcctgctggatcgcccggacggacgttccataccgccgggcgagatggccgagcgtctctccgtcccggacgacatggcggaccgtgaaaaccggcgacttgatctttttcgcctggaccagcatcgggtagacgcgccggcccagctcctgggcgaccggattgtaaaaacggacatgataatgggtccggtgtccgcgggcgtagcggatgacggccgaggacgatccctttcgatagcggaaaacgcggtcgagccaggccttatcctcgccgatggcggcggcatatccgtagaggagcttttggatccccgtgtcgagaaaaatcacttccacgtccgtgcaggtgaggatggcccggaccaaggcccaattccgcggcagatcgagcgtcgccgcggttccaacaggaaaaccggaagccgtcccggttttgtaaaaaaatccgaaatcgacgtcccggccggcttggtgcgaggcatggcgcttgagccggccgccgtcgggatcgccgatgtcgccgatgacgatcgggggcgtgccgggaaaggcttcgtggaccttggccacgaccgcccgcaccgcctccacggtttccgccgtcgcccaacactcggcccgcggaaggaattcccagcgcggatcggccggcagggaaacgctgttgataaccacggcgctgtccggcgtgccgagcgaaagcgagcccagggaaccgggattttcctcaacgcgccgccgcagagcgtcgtcgtccagatcgagaagcgaggcgggcgaggccagggcggagaagaaaggcgcgggagccaggcctccggagaccggcgccggggcggccgccagggccgcctggaaagcccagcccgcgaataatccaagaaaaaacatgatccggctttactccgctcattctactcatcccccccctcgagtcaagcaaaatcgcggatccccacccttgacaatatcaatttatcttgatatattgaaaagcatgaaagacgggaagacgtccgattcgctgcggagcctcaaggctttggccgacgaaacccgtctgcgcttgtttcagctcggccggtcgttcgagctgaacgtcaacgaaatcgtcgaaaccctggggatgggccaatcccgcgtctcccgccacctgaagatcctggccgaggccggcctcctgacgtcccgccgggacggaatgtggacgttttaccggaccgcggccgacggcccggccgcccggttcgccgcggcgatcggcgaaaaggatcggggtattttcgcccgggacctcgcccgggcccgtaaaattttagaggatcggaaccgggaatcgcggcgttttttcgacgcgatcgccggggattggggggagatgaagcgcgccctgatcggggacgcggccttggatcccctgctcctccggcatgtcccgcgcggcgaggtcgccgccgatctgggatgcggcagcggcgatctcttcgccgtcctgcgccggaaagccggccgggtgatcggggtcgaccggtcgccgcgcatgctggaggaagcccgccggcgccacctgtccgacagccgccgggggatcctggagcttcggatgggcgagctggagagcctgcccctccgcgacggcgaagtcgattgcgccctgatgtgcctggccctccatcatcttccagatcccggccggggcctcgccgaagccgcccggatcttgaagccgggggggacgctcgtcgtcgtcgagtggagcgcccaccaggacgaaacgctccgcacccgctttcaagaccgctggctcggcttcgaacctcagactctcgaggattggctgaccggatccggtctgtccgtccggacgaaaacaaccctctcccttcccacgggcttgaaaatccttcttttccggggtcgcaaatgaccccggcttcaccgctcaaggagaatgccatgaacaccgagaaaaaaaccgttcttcccctggaccggtcgcttccctataaagtggccgacctgtccctggccggctggggccggaaggaaatccgcctggccgaggcggaaatgcccggactgatggccgtccgggagaaatacggaagccaaaagccgctccggaacatgaaggtcatgggcagtcttcacatgaccgtccaaaccgccatgctgatcgagaccctccgggagctgggggcggaccttcgctgggcgtcatgcaacattttttcgacccaggatcacgccgcggcggccgtggccgaggccggatcggcggccgtcttcgcttggaaaggcgaatccctggaggagtactggtggtgcacggaacaatccctgacctggcccgacggctccggtccggacctcatcgtcgacgacggaggcgacgcgacgctgttcgtccactggggggtcaaggtcgaaaaggattcctccctgcttgaccggacgtacgacaaccgggaactccggatcgtcatcgaccggctgaaagagtccgtccgccgctcccccgggcgttggacggccgcggccgcccggatccgaggcgtctcggaggaaacgacgaccggcgtccaccgcctctatcaaatgcaagccgaggggtccctgctcttccccgcgatcaacgtcaacgactccgtgaccaagtccaagttcgacaacctctacggctgccgcgaatctctggccgacgggatcaagcgggccaccgggatcatggtcgcgggcaagaaagtcgtcgtctgcggctatggagacgtcggcaaaggctgcgtccaatccatgcgcggcttcggggcccaggtcatcgtcaccgaaatcgacccgatctgcgccttgcaggcggccatggaaggctacccggtcgtccccctcgacgacgtggtctccgagggggacatcttcatcaccgcgaccggctgctgcgacgtcctcaccggagctcacatggagaggatgaaggacgaggcgatcgtctgcaacatcggccatttcgacagcgaaatcgacatgcattacctggaaaacacgcccggctgcgtccgggagaacatcaagccccaggtggaccgctggacgttgaaatcggggcggtcgatcatcgtcctggccgagggccggttggtcaatctcggctgcgcccaggggcatcccagcttcgtcatgagcaacagcttcaccaaccaatgcctggcccagatctggctggccggggaaaagccggctttgggcgttcacacgctgcccaagaaactggacgaagaggtcgcccgcctccacctcgggaggataggcgcgcggctgacgaagctgacggaaaagcaagcgggatacttggggattccggtcgacgggccgttcaagcccgatcattaccggtattgaggcaacggggccgcctcctcaaagggaggacgcttccctattcggattcggaaaaaagatcggtttcctccaacaaggcccgggccgcctccaaatcctcatctttaaccatgatccgaacctcgcccagtccgtccgtcgtaaaaggatagacggtgagaacgttgcggccttggaaaacgcaatcgatcccgttgctttccagaaaagccttgatgatgtcggcctcggtcagtccccaaacccggcggacttcgatcagcttcgtctcctctgcgctcatggggcggtcctttcgtttccggccattctctcccgcattatcgcacattaatccccgcggcgcagccccgcccgctgaattccattagatgtcgctgaaggatcaaccccccatcgagccgagacgaaggtccttccccgcggaaacgcgttaatcgggatcgttcactcgaggcgatacaaccccgcccccgggggaagcggccccggctcttcgaatccattgcgcttgtccaccctttcgtggtagtttttgggggacttcgtcccccgtttaaggagaacgaaatgaaaaaatccaaaggctccgatcctcaattgacggccgggccgctcgatcttcccggattggccgactaccaagagggcgcgatcgtctcccggacgatcatcgacaaggacgccgggacggtcaccctcttcgccttcgacaagggccaaaagctcagccctcactcggctcccttcgacgccttcgttcagatcatcgaaggccgggccctcgtcatcatagataaggaagaatatccgctctccgccccggcggccatcctcatgccggcggacatcccccacgccgtccaggctctcgagcggttcaagatgctcctgacgatggtcaagtcgtagcctcgcgtctcggaaaaaacacgccggatcccccctcatcgtgacgcggcgccgccgggggagtttgaggggggcggcacggctctcctcaggggttcagcgaagcgccgaagggggagcttgactcccccttggaagtgtcccgtctcctcggaaatcacggaaaagattctaatgagacgggacacttgggaggccgagtgttttggccagcctctccgtcatctcagccgcccggtcgaacgccgccgcgacgtaatcgtcgacgctctttagggcttcggccttgttgaccgcgtattgggcggagagggcggcttcgaacgcgctccggccgtcaaggaaagagcgctcgagaatctcgattcccttccgcacggcctcgatcttggccccgtaatcagcctccacggctttttccacggcgaggacgcgggtattgaggagcatccctcgagccgccttgaacccggcctcctcgaaatgctgccggtagaaggcctcgtcgtcatgcgtttggggacccaggctgaagccggccgggagggctccgccggcgccgtacaaggggaggaagaccgtcgtatccggttttcccagcgtcagccaaagggaagccgcgagcggtcccgggcgggaggcgtcgagggaggcgatcaggctcgtgaccgtcgtcgccgtgcagatcgtccgaaatttcgcgcggttcggggaaccggtcttgtatccatccgtggcgtcgtaaggcgtgccttcgtggtgatcgcggagaatcgccatcagccgctcgacggtgactttttccgccggcttcacggaaaacggataattctcgccgatgggccattcccggccggtcagcagctcaagcccccgccagtggcgaagggtattgtggtcggccagaaggtcggtcgagggacgggtgtaggcttttttaaaatcaaacggcccgtccttctccggatcgtaccagccgcgggcttcggcataagacacaagatcggcggagccctggaagcggacggaatcgcccaagtccacccggcggatcgtcatgtggttgggaaggatcgcgacctcgtcgtcgggaacccgctgggcgacccagcggcgtccccggacggcggccaacagccaggcctcgttcccgtcggcgacggcataggtgcgaccggaatcccggtagccgaattgttcgataagcgcgccggccagggccaccgcttcccgagccgtccgggccttttcggcgacgatcctccgcagcatgtaaccgatgccgccgtcggtcagatcgctctccgtctcccgggtcggacagctgtccgaaacgaggacgactccatgcgcgttgacgaagctgtcggagtattcctggggggccacctcgatccagaggaatcccgccgtccggccgtccgtccggtaatgggctccccggccgagggcgacattcctctcccggccgtaatcgcccggcggaatccggcggacattgacgatattgtcgccccaatcgtcctcgttatgggccaggaggaccgacccgtcggccgaagcggccttcccgacaacaatcgtgtaacaatcgaaattccggccatcgcgggtcgcggcggacaaagccggggaaagaagagcggcggccaggatcagggcgttcagccggcgtgcgttcatcacggtcctccgggaaacagcggtttttttcaaacgttccggtcgcggcctatcttatgacgccccgggccgtatttcaagccgcccggagttgcgatcacgatcgcggatttggggatcaaggacgatcccggctcccaagagaggcggccgactcgatcgcttttaatggaaaagacgagtccttcggccggccccccgcgcctctaacggctgaagcgcagataaatcgtcgggccttgtccgtcgatctggagattccagcccgcggcccgggcccgatcctgccagatcgcctcgaagatgcccatgtaatcccccaaggcgatttgctcccggagatgggatgtctgcatgtaaagcgcgaagaattgatgatcgtcgaaccggacgaccgcttcgcgatcggtcagcttttccagaacgaccttgtttccctgcatcctcgcctgctcccagcagaggtaaaggataaaagcccgggatgcgggaaaatagggaatccaggacgtcgccgcctggacgtattccgccccgtcccggagaaatcccaaggcgtattccgtccccttgaggcgggtcatctcggtgaacagcccgacgatcttcgtccaatagatttcctgccgcatccagttcttccgttcctcggacaggtcggggaacgaggaggcgtcggccggaagggacacgacttgatccagccggaggaaaacgccctcgacgaatcggtaataccagcggcccccttcgacggtgaaacaaaagacatacgtccagggagctcggcgctttttccccacctcgatgatgaacgaaacgagattgtcttgacggacgacctttggagtggcccgccattccgaccaatcttcgtccttggtccaatccagcagattcgtcagccgcgattcccgggtccggggatcatccggatgaatccagtcgaccgtcagggttcccgacctgagcagctgaaggaattccttccaaatatccatatcggaggccggcggagcggcggcggcccaagaaacggccatcaccgtcaacagaaacgcggctgtgaattcccttttcatcctgtccctcccattcttttttccgccggctccggcccggcggccggcccttttattattatacttaaaaacaaaggaaaaacactcctcatctggtcggagcccccttcttcccgtcttcccgctccgccgagaccgcccaggccggataaggcgcgccgcttccccggaccgcgtgccagaggatacggttgaggatgttctccggacaggcatcgaaccgggccgagttctcggcgtttctgcggaggagaacgtcgccgatcgtccgcggatccggattcatctcgtccttttgctcatcctctctttccgcttatttcattcccgaaaaagaatggtctttgttttttccttgcttgcccgcgggcggttctccgggccgctccgtccggacatacagcacgccgagccggcggatgagagcttgaaattcctccgcggggagatcgctcgcgatctcggccgccacgggcttgccgaaaaacagctttccgttcatctcctcgatgaggccggtgatccggacaaaggccgaggctggagcgtccttcacgaccgtcgtcatcttgccgtcgtggaaaatgacggcctcgacggagggcatccgggagacttttttggcgaagtccgccagcagccgctttttcctgttccgaattccccggtaaaggaaaacgccgataacggccggggcgatcaggcttccccaattgaagctcgtgaaaaggaggaggaccgctaaaacgacgaccccggcgacgatccaaacacccttggctcccagcggcacggagcttatcatccggtcaaaccaggcctgcaagcgttcaatcggccgaaggtccgtccggcttcccgattccaggtcgagtttgaaccgcttcagatcggaggccaaggtctcggcgtccggatagcggtcttccggccgtttccggaggcagcgggagacgatgcggtggacctgcggcggaagattgcggcggacgaccgtcaccggccgggcttcctcgtaggcgatggcgtgcatcgtgtccagcggcgtttcgcccttgaacgggagctcgcccgtgaccatttcatagagaacgacgccgagagaaaacaagtcgctccggacgtcgaggtcccgcccccgggcctgctccgggctcatgtaggggaccgttcccatcaccaggccgggcaaggtccggccggcgtccttggtcaaggtccggagaggatcggacggcggagcggatgcggccggagccggttccatcagcttggccagcccgaagtcaagcagcttagcccggccgtcgcgcgtgaccatgatgttgtccgacttgatgtcccggtgaaggatcccggcctcgtgggccttttccagtccttcgaccacctggaaggcgatctcgacggagctcaagagatccaactcccgatcggcgatcagccggccgacggaccggccgtcgatatactccatgacgatgaacagacaaccgtcgacctcgtcgatgtcatagacttgagcgatggccggatgactgagggcggccgcggcccgggcttcttggacgaaccggttccgccgttcggcgctggcgaccagggcgggactcaggagcttgatcgccaccggacgattgagccgggtgtcccggccgcggtaaacgacgcccatgcccccctggccgatgaacgcctcgatgcggtaatgcttgaggtctgttccggttaagtctgtcgagccggaaatatccttcacgcacagcatcatatgttcgggcggacggcaagtcaaccggcggaacgagtcccggtgatgagctcgttctttcgagaagctccgcctgaatcggccgggctgatcggctgccatccaaccgcgctccggcttccaagaaccgttccggaaggccggacgcgggagcctccccccttggatttccgccttggaacggagcgggttcagctcctttccgagggagaggagtccccgtctgacgagaaaatttcctcccgccgccgtgcctcgcgaggcgccggccaggatcgccgactctgtcgggccggcttcgaaaaagccgccggaacccggctccgaagagccgggctccggcggaaacgagatccgcggaacggcgggccgctatttcttgatggggtagggcggaatcccgggcagcgtgacttccttggtcttgagctcctcgagaataacctcgacggctttgttcagctggtcgtcgatcccggcgtattcgcgggccgggtcattgtcgacgacgatgtcgggctccacgccgacgccctcgatgatccacttgccctccatattataaggggcgaattccggcctgttcaggacgccgccgtccaagatcggcagggtcccccggattccgacgacgccgccccaggaacgctttccgatcagcttgcccatgccggcttttttgaaccggtaggggaagatgtcgccgtcggaggcgctgaattcgttcaaaaggcagactttgggtccgaccaggacgtcgccgggatcaggccgggcgatcgtgtcgcggcccatttcgatcatcgccatttcccgccgcagccgttcgaaaaccagaggggaaacgaagcctccgccgttgccgcggacatcgatgatcaaagctttcttgcgaagctggggatagtaatacttgacgaattcgttcaatccgtccagccccatgttcgggatgtggacgtagccgaccttgccgccggtcgccttgtcgaccttggcgatgttctcccggacccaggtgtaatagacaagcttctgctcgtcggcgacgggtaccacaaccacccggcggccgcccttgtcctccggtttcccgttgactgtgagggtgacttgcctgccgacggtgttcagaagggaggcgtagatgtcggtcatctccttggtcggccgcccgtcgaccgccaggatgtaatccccgtccttgacgtcgacgccgggctcggtcagcggagagcggagcgagcggtcccagttctcccctcgcaggatcttgtcgacccggaaatatcccgaggcgtccttgacgagaaccgcgcccagctggccgaccttgaccttgggcagatcgggcatctcgccgccgccgacgtaggtatggccggcgctgagctcgccgatgagctcgccgatgacataggtcaggtcggcccggcagccggccgcctgggccaagggcaggtatttctctctcagggcatcccaatcttgcccgtgcatattgggggcataaaagaagtacttcatctggcgccagctctccaggaaaatgtgctcccattccgccttgaggtcgagggccatgtccatgccggagagatccagtcggtcctcgattttgaccggcccctggggcaggtcgatgatggcgtaagaccggccctgggagacaagcatcttcttctggtcggccgagatctcataaccgtcgatctggcccaggtcgctttccttgcggtcggagaggctgtaggatttgaaggctggtccgccgcccgggccccggctgaatttcaagtagaaaaccttatccccgacggaggccaggccgccgtaattggccgcctcgacgggcagaccgatcaggcggtccttcaggccttcgaggtcgaccttgaccgtgacgccggccggcttttccggctcggacttcttcggctcggccggctttcccttggctccgctcttcgggctttccgcctccgcggccttcttgatttcgacctcgtcgctcttcggggcgaagggagacggggtgtcggcggccaggggaaggcaatagatccgagccatcgaggaataggaataattgaactcgatctcgctcagttgcggattgaaatcccggtcggaaacaaaaaagaggtatttcccgtcgccgctgaacgccggctcatagctcgagtaccagccgtccgtcaccgcggccgtcttcccgccgtcgaggccgtgaagataaaccttcggcattccctcggcttccggcttggtaaaggcgatccagcggctgtcgggcgaccaggtgaacggtcccatctcgccgaccgcggcccggtcgaccacggtcacctgcttggtcgccgtgtcgacgtactggagccggaacagcttgtccgtccaggcgatcttcttcccgtcgggcgaccacaggaatccgtacttgtaggtgtcggccttgaaggtcagcggctcggcctcgccggatccgtcctggggccggaggtagatctcgtcctcgcccgaggcgtcggaaatgtaggcgatccaccggccgtccggcgaccacttggaattccgctcgtggatccccgacgtgttggtgaggtttcgcgtgtttccgtacttggccgggacggtgaagatctcgccgcgggcgccgaagagggcccgcttgccgtcgggggagatttcgtagttcgtgacgcgcgaggcgacattggcgatccgtccccgggccgaaacctggtcatcctcgatgaaaatcggaacccgggccgctttttgcgaggccaggtcgaagcggtagatgaatccgccgttctcgaagacgatcgccgtcgggccgagcgacgggaacttgatgtcgaaatcggcgaagcgcgtcaaggcccgcgtttctttggtcttcacgtcgtaagcatagagattcatccgcttgttctcgtcgcggtcggagaggaagtaaatcgtctctccgctccacatcgggaagatatccccagcctcgttggtcgagatgttttcggtctttttcgtctcgaaatcataaacccagatgtcgtcggtcatcccgcccctgtaccgcttccaggtccggaattcgcggaagacgcggttgtaggccagcttcgagtcgtccggggaaaaggaacagaagccaccgcgcggcaggggaagcgcgacgggggtgccgccctcggccggaacgacatagagctgtccgatgaaatcgtcccattccctcatccggctgcggaaaacgatgctccggccgtcgggccgccagcccataacgatgttgttcgggcccatgcggtcggacacgtcgtcgcggccgagggtcgccgtataggtgaggcggcgcgggatgccgccgcccgccggcatgacgtagacttcgcggtttccgtcatattcgccggtgaacgcgatggtctttccatccggggaaaaacgggggaacatctcgtaacccggatggcttgtcaacttgcgggccaagcccccctccagcggaacggtgtaaagatccccgccggagctgaagacaatcgcttccccggacgcggccgggaaccggaggagacgggcttccgtcgtctcggcgaagatgacggacaaggcgatgacgctgaacaacaaagcgaacatccacgacttcttggacatgatctctcctttgggatatggaaggatacgctcacttttcattacgaattcccccggctaaaggttgcggggatgatcgttctttatctcttgtttttatcggcgccgagcatcgggacgaaccggaccagggtgatttcctcctcgaccggcttttccttgaccttgcgcacccggaccagccgctggacatcggcggcccggcccaaggggatcaccaaccggcctccttcggtcagctggtcgaacaggggtttgggcaggcgccgggccgcgcaggtgacgatgatgccgtcgaacggagcggcttccggccagccgaaaaatccgtcgccggagcggacctcgacgttggcataccccagctcggcgagccgggcggccgcggtcccggccaaggaggcgtgatactcgatggtatagaccttcgcggccaggaccgagagaacggcggcctggtaccccgagccggttccgatttccaagatccgctcgccgcccctgagctccaggcactgggtcatcagggcgacgatatacggctgggagatcgtctggccttcttcgatcggcaggggaaaatcctcgtaggccagctcccgggactccggcggaatgaagaggtgccgcggcacccggcccatcgcctcaagcacgcgcttgtcccggatgtctcgggaggcgagctgcccggcgaccatggcttggcggcgccgggcgaagacggtgttctcgtcccggcccggggccggccccccgccggaaaaaaacaagccggccaaggccaggagcaacactccagcctctgcggtgctcatgttgtcattataatccaaaaagaccggaaaagagtttgttcccggtcaagagccgctttttctcccttttccgaaaagccttgttttccgcaagactcacgttaaatcaatcagttatccaaaaagaaaaaaaaggaaagagaacggccctcttttcgtctaaaatatgaaggttggtttttacctcgccttcgggccggattcatcttggaggtcttaacggattatgaaacgccctacccgcgcagccatccccctgcttctggcggtcctctccctgccggccccggcggtccaggaaggggagaatctgaatttgtccttgccggaatgcatccagaaaaccctgaacaacaacctcggcctggcggccgaggttctcacgccgcaaatcgccgaggccgcggtcgccttggccggagagaaattcatcccctcgctggctctttcctacagccggcaggacaatatctccgcctcgtattcattcctggacgccgccggggcggccgtctccacgctgcaaaatgattactcctcccaattttcccaggttcttccgaccgggggaaccctctccatgagcctcatcggctataaatcggataccacccggcaattccaaaccatcaacccgcgcttcggcagcaccctccggttcaatttttcccagcctcttctcaaggatttcggctggaaaatgagccgccgggagttcatcctggcccggaacaaccgcgacatgtccgaatacaacctcagcgagacgatggaggaatacgtctaccgggcgaagagcgcttattggaatctcgtgtatagccgggaaaatttgaatgtccggcggcaatccttgaaattggcccgggagctgctggaaaaaaataaagccgagatcgaagccggcaccctgccccccatcgaaatcttgacggcccaagccgacgtctccacccgggaagcggatattctcgaggcggaggccatggtccgcaacagcgaggacctcttgaaaaccctgatgaacctcgaggcggagaatacgcgggccgcctccctccacatcatcccgaccgattcgccgtcggtttccaagccggacgtggatctcgaccgggctctccgcgaagcttatgagaaccgtcccgatctccaggcggcccgggtcggcatggaaacgagccggttcaacctcagctacgcccggaaccagacggcgcccgatctgcgcctgcaggcttcgctgtggagcccgggcatctcgggaacgcaaatcatctatgagaacaacaacgccttatcgggcaagatcatcggggtcgtcccggccggcggcggtcaagccctgaaggatgccatggatttcaggtacaagaactggtctctcggattgagcttgaacatccccctgagcacggtcttttcccgggcgttcgtggcccaagccgacttggctctcgagcaggcccagctccggatgaaaaaccaggaacaacagattttccttgatatccggaccgccgtccgggcggtcgagaccaattacctccggattcaggcctaccgggtcgcccgggaaaacgcggccaagaagctcgaggccgaggaggagaagctcaaagtcgggctgagcaccaattatttcatccttcaataccagcgggacctggccaacgccctgaccatggaactgaaggccgtcgtcgattacaatgtttcgctggccggcctctaccgggcccaaggcaaaggcttggagatggagcgcgtcccgcttcccggggaatccggcgggccggcggagagatgactgttcctcccatgaccgataaaccgtcaaacgacaccaattcccaagcgagatccgccatgcctaaacaatcgttttttcaaatcctccgccgggccaagctcccggtgaaaatcgccttggccgccgtcctgatcgcggccggttggggcgcttatcaagtctttttcgccaagaaaggcccgcagaacgggccccggaacgtcatggtcgccgtcgaaaccgccgcgatccgccgcgggccgatccgcgacgtgggcttgttctcgggcaccctgatccccaagacgagctttaccgtcgctcccaaaatctcgggccggatcaagcagcttctggtcgatatcggcgacaccgtccggcagggccagctggtcgccgttctcgaggacgatgagtatcgccagcaagtcgcccaggccgaggccgatctccgcgtcgcccaagccaacctggccgaggcgaaaagctccctggagatggtcaagcgggacttggaaagagccaagtcgctccacgccaagggcatccaatcggattcgcagctcgacgccgcccgggcccagtatgaagcccaggaagcccggtccaatgtcgcccaggcccaggaagccaaccggaccgcggccctggaaacggcccgcctccggctgtcttatacccggatccaggccgcctgggagcggggaagcgcggtccggtacgtcggcgaacgctttgtcaccgagggatcgatgctcccggccaacggcgcgatcctgtcgatcatcgagctccaccccatcacggccgtgatcttcgtcaccgaccgggattcctaccgcctccagcccggccaggaaaccaacatcctgagcacggcgttccccgacacggcctttatcgggcgggtcgcccggatgtcgcccctgctgaacgaaacgtcccggcaggcccgcgtcgaaatcgagatcgagaatccgaacggcctcctcaagccggggatgtttatcaccgccgaaatcgagtacgaccggcgggcggaggcgacgatcgtcccgctcagcgcggtcgttcagcgcgccggagcggccggcgtttttctggccgatttaaaaacgaggaaggcggtcttcgtcccggtgaggaccgggatcgtttccggggaatgggcggaggtcgtcgaaccggccgggctgaccgggcaggtcgtcaccctcggccagcatctcctggaggacggggtcggcctgatcctgccgcaggcaaacgggggcgggccgccggccgcggatccggccggcaagccccacggagcaacgcgatgaccatttccgaattctccatccggcggccggtcttcaccgtgatgatcaccctggtcatcgtcgtcgtcggcttcgtcgccctcaaccggctgcccgtcgacctgatgcccgagatcacctatccgaccgtcaacgtcgtctgctcctacgaaaacaccgggcccgaggagatcgaggaactcatcacccggcccatcgaggaggcgatgagcgcggttccgggagtggaggaggttttttccacctcgtcggaaggcagcagcgtcgtgcgggtcaccttcgattgggggacggacttggacgcggccgccgacgacatccgggagcggctggaccgggtcgtcgggcgcctgcccgaggacgtggaccggccgacgctccggaaattcgatccggcccagttcccgatcctcatggtcggcgtcctcagcaatctcgacccgatccgaacccggcgcctcatcgacgagcagatcgtctaccggctcgagcgcgtccccggcgtcgcctcggtcgacgtctggggaggacgcgagcgggagatccaagtcaacctccaggccgataagatcaaggccctggggatcccgatggacacgatcacgtccgtcatccgcagggaaaacctcgacctgcccatcggccagatcgagcggggcaactatgaaattcttctccggatcccgggggcgttcaccgacctggaccagatccggaacaccgtcgtggcttttcggaacggttcccccatcctgctcagggacatcgcctccatcgaggacaccttccgcaagatcacccgggtcgtccggatcaacgacaagcccggcacgcggatcgccatcaacaagcagtccggcaagaacaccgtcgccgtggccgagggcatcaaggccgagttggccaagatccgggaagacctgccccagatcgagctgatcgtcgtcagcgacagcgcccagtatatccggcgggcgatcaacaacgtcggctcctcggctctctacggcggaatgctggccgtcttcgtcctgctgttcttcctgggcaatatccggagcaccctggtcatcggggcggccatcccgatttccatcatcgggacgttcgccctgatttacttcggcggcttcaccttgaacatcatgaccctgggcggcctggccttgggggtcggcatgatggtcgacaacggcattgtcgtcctggaaaacatctaccgcctgcacgaaggcggcctgcccatccgccaagcctccgtcctgggaagccaagaggtcatctcggcgatcatcgccagcacgctgaccaccgtttcggtcttcatgcccatggttttcatccgcgggatgtccgggatcatgttcaagcagctggcttacgtgatcagcttctccctgatcgtctctctcttcgtcgccctgaccttggttccgatgctctgcagccgctatctccgtgtggagaaaatcgagccgggctcggccccgggattccacgtcgccttcgtccggtcgacccggggcgtcgtggccaagctggagaaggcctaccgccgcctgctcgtctacgcccttgatcacaaggccgtgattctgggaatcgccggcggtctcctcatcgtcagcctgctgctcatccgggccgtgggtaacgagttcatgccggcgacggacgagggcgaggtccgggtgagcgtcgagatggaagtcggcacgcgcctcggcctcatggacgataaaatcaaacaagtgtcggccgtcgtccggcggacggttccggaaatgatcagcctcgaggaaaacgccggaggcgggggctggcggagcggttcgaacacgggcaacctcaccgtcaagctcgttccgaaaaacaagcgctcgcgctccagcgagacggtcgcggccgacctccgccgcgacctgagcgatatcccgggcgtcatcatccggacccgggccaccggcggccagcaaggcatgatgatgcgcggaggcggctcgatggcccgcctccagatcgagatccgcggctatgatcttctcgtcgccgaagacttggcccgccaggtccagaagaaggttgaagccctccccggggtgaccgacacccggatcagccgggacctggggaatccagaagagctgttcatcgtcgaccgcaaggcggcggccgaccagaagctgtccatcacccagatcgggcagacgatccagaccatcctcatgggcacccaggccacgacgttccgcgagggcgggcgcgagtaccgggtcctggtcaaggtgaaagactccgagttcctgtccatcgacgagatcctcgacctgaccttgaccaattccgagggtcgggccgtcagtctccgcaacgtcgcccgggtccagccccgccgggggccgatccgaatcgagcggcgggatcgggaacgggtcgtcaccgtcacgggggacatcgccggccgggacatgggctcggtcctggccgacgcccggcgcgccttgcgcacgatcccgacgccctcgaatttcgcgatcaacttcaccggcgactacgaggaacagcagaaggccttccgcgaactcctcttgagcatcaccctggccctccttctcgtctacatgatcatggccatgctctacgagtcgctccgcgatccgttcatcgtcatgttttccgtccccctggcggtcatcggcgtcgtcctgatgctctggatcaccgggacgaccttcaacatgcaatcttatatcggctgcatcatgctcggcgggatcgtcgtcaacaacgccatcctcctggtcgactacacgaacctgcttcgacgccgggacgggatgggcctccgggacgcggtcatcgaggccggtcatcgccgccttcggccgatcctgatgacggccgcgacgaccatcatcgccatgatccccctggccctggccctgggcgagggcgcggaagcccaggccccgctggcccgggccgtcgtcggcggtttgaccagctccaccctgatcaccctggtcgtcgttccggtcgtatactacctgttcgaacacaagagggacggaaagaaaaaggaaacgccctgatcccggcgggaagggaatccttccctccgggacggccgtctcaaagctggaagcaataggaaaatttgatcaggaagacattatccgggtgggtgtcgaaaaggccccctaaatcccggctgtaatcgaatgagccttcgggaagaaatcccgtcctcccctgcgaccaaacgacgtagagggccgagccgggagtgtattcccagcggaggacgaggttggagcggaattcacggacattgaagtccggatttccgaacgcgtaatccacggttccgtccccgttctcgtccacccggtattgccgggcggacggatcatagacggccgcctcgcccagcaagcggaaccgctcctcggggatccgggaccgcgaattcaggatcgtcttgaaatcgcggtaggcgccggccgaaacgaacggcatcccgtaatattggatcgtcaagtccggcgtgaggcagtaggtcatcctcaaggtcagggccagcgtttcctggctgatcgtcccgaagacgtatcgcggctccccgccggccgtccgcgttcccgcgtattggaggacgttgtcgttccgggaataggacggagcgagggagacttggaaggcggagctggggatgacggtcaactccggggacatgctccaagaaacgatctcggccggcccccgccggcccccgcttccaaaaagggagaaccggaccttcctgcgcgaatcggtcccgacatacccccagaagtggttcccccccggcaaatacagagtcggtccgccgcggagagccgccgcggagagggagggcccttggggattgtagccgaaaccggcctcccattcatttttcaaggtcaggttgaggttgacgttgccgccctcgaaaatggtctccccgccgaagttgaagcccgcccaaccgttgaagttgacattgactcggcggaacggcccgaagggctccgtgacccggtatccggcccaaacgaacgccatgatcatgtccgtctgccggagatagccggcgtcgttgagctccagcccgggcgagcgccacgtcacgccggcggcatacgtccagtttcccccgccctgcttgccgatctcgaaattgccccccgtgccggtcaaggacgtccgcctgggatcgagagtgacatatcccgcgtccggacgctggaaatagcggaggggagagagctgggtcgccaggatcgcctcggccgttccccggacatggctcgtcacagccttgaagctgaggtaataattccggtttccccagctgtgggaaaaatcaatccctccggaataagcggcccggtgaagagtctcgaacgctccgccggccgcctcccggttgacggccgtgatcatccccccgaggaccgtcgccccgctgttccagtccttttgaacccgggcggcgaaataattggtcaggggctccacggccacatcggtgtaaacctcatcgtgaaaaaccgaggccgattcccgcgacgtgaccgattccatgaggccgagggaaaatcccgacttggttttccccgtcagcttgaacgcgcccaagatcgtcgcggccgccggcatgtcgacgaaaccaggccccccgggcatgacctggggtgagcggcctacccggcgggaatagaaaaggttgtcgtaggaaaaatcgccgtcgccgctcgtgagccggaaatcgaaaagattccggccctcgatgaaaaacggacgcttctcctgtaaaaacgtctcgagcgccgtcagattgaccacggagggatcagcctcgacctgcccgaaatcgggattgatggtcaggttcaacgtcaggtcgctcgtcaccccgaccttgccgtccaagccgctccgcagcctccggttccgcccggtggcgaagggattccccgggacggggcgggaggacatcaggcttccgaccgcgtaaggcatgacctcgacttggtgcggcgcggccaggcccgccagcccgcccagctcgccgaagaggtgaacccagccgggggcttttcggggaatgagctgccactcggaagtttcgttggtccgaaacagggtccgaaggacctggagcccccattcctgctcgtccttgaccccgaaccgaagctgggagagaggaatcctcatttcggccgaccagccttgatcatccgaggaaacagccgcgtcccaaatgggatcccagctcatgtcttcctccccgccgccggcggaaaggccgttgtttgccacgatctggtcggccttgactccggcggcgttgaccgagaagacataagcggtcaagtggtcatggagactgtcgaaagcgaccagaaccacgtccccgccggcttgatcccggcggccgaggcgtttttcgatcaagtcggggcgggtatcatgggcccggatgccgacgtaaacatttttatcatcgtaaagaatcttgaaggacgtttgttccgtaggttcccgcccctcgtagggatctctttggacaaagccgctttcccaggatccgttctcccaggcggaatcgacgagccggccgtcgatgaccgggacgctttcgccgatccggatcgccgcgcatttcttgacgccgggaccgccggccgcgccggccagaacctgtccgacggcgccgaggatcaataaagcggctccgatgcggaagaaacgattattcatgacatcctctcatgttattttccaagctcacagaaggaaagactctcgggcggaggaaaaggttgacatgaaccttttttccctccgcaccgtatatccgaatgaacgggcggtcaacgacgattgccgcgcggttgctttacggaggatttcgacatgaacacccgcttgagaaaactcatcaccgcggttgccttgaccgctgtttttcttcccgtttttctttccgccttgacgactctcgagctggccaccacggccaagccccccgtcatcgacggcaagctcgatcccggcgaatgggacggggcttacgccatgtcggaattcaagacgtttcagccggactacggcaaggagcccagccagaagaccgaggcgtatttcctgtacgatgccgacaacctctacttcgccttccggtgctatgacacggaaccgtccaagatcaaggccaccctggccaagcgggacgacatgtacgccgacgatttcgtcgggatcgtggtcgacacctacaacacgatgcagaacggctattctttcctggtcaatcccctcggcgtccagggcgacggcatcatgacaaccgacggcaacttgaccgccgaacaagatttcgtctgggacagcaagggccggctcgacgaccagggctatatcgtcgaataccgcgtcccgctgcagagcatccggtttccttcgggcaagacgatcaccatccggctggcctacttccgccagatcgtccgaacctcggaaatggccagcgccccgcccgtctaccccgacaagagcagctttctcgctcagacccagccgatcgccgtcaccgggtggcggttcaaacgcgtcgtcgagatcctcccggccgtaacgcattccgaccgaagagccgtcgacgagggaacgatgaaaagagaggagagggcgaccgacgtcagcttgacggccaaggtcggcttgacgaccgacctgaccttggacgcggccctcaatcccgacttcagccaggtcgagtcggacgccggccaggtcgacatcaacctccggtatgccctcttctaccccgagaagaggccgttcttcctcgagggaaacgagatcttctcggtcgccggaaacaccgaggacgcgcccctctatgcccttcttcacacccggacgatcatcgatccgacatacggcttcaagctgtccgggaaaatcggggcggccaattccatcgccgccatcttcgcccgcgacaaccagcccggagccgacgatgagcatccctatttctccgtcttccggctcaagcacgctttgaaggacgattccttcatcggcggatactataccgcccgggacgtgaccggcggattcaaccgggtcatcggcgcggacggccggttccggctgagcccgatcagtttcgccgacttccatctcttcgggtcgttttccaaggccccggacgggggagaaacggccggcggccacgccctcggccttcgttacaaccagggcacgcggaattactacctcgatttcggataccaggacatttcccgcaacttccaggtggacacgggcttcctcgagcggacggggctgcggcgcttggcggcctgcggaatcctcatgttctacccaaagtccaagatcatccagaggtatgacaccttctactggtcctaccatctccaagacacgacctcgaacatgttcgagacgttcaacatgttctgcctccggttcttccttccccggtcgacccaggtccgcttcgaggggatgctggccaacgaggtgtacgaggcccgccgcttcgggcggagcggatacggctttcaattctacagccagcttaccaaacaggtttatctcaacctgttttatcgaaaccggggatccatttattacgaccccgacgatccttaccagggagactcgaaccaagccagcgccggcctgtccttccagccgaccgaccagctgaccttcgctctcgacctcgtctaccgtgacttcgcccgccggtcggacaaggtcaagatctacgactacacgatcgtccgcagccacaacaccttccagatcaacaagtatctcttcctccgggccatcgccgagtacaacacgtattacaagcgctggacggccgatttcctggcatccttcacgtacatcccggggacggtcgtttacgcgggttacggctcggccttcgagcggatccggtgggacgggctcgaatatgtcgagagcgagcggtacatggaaaccaagcgaggcttcttcttcaaggtcagctacctctggagatggtaagcgggcccggcgcccgccgccggccggacaggccggtttgacggaggacggggctcccgttatacttgcctccgccatgccggcaagagattccctccggacaaaaatcttccgggtggcctttgggacccttgtcttcgccgtttcgttcacgctatccgaccgtcttcttcttcgcggattgaggtcctgggccaacacgtattacgcctcccgggacgcggacgcctccctcaggaacaaaacggtgatctacggcgagggaaacggagacatcttgatcttcgggtcctcgcgggcgcgtttcgcgttcggccagttccagatgtccgaccggctcaaggcccggaccatcaaagtcgcggccgccggacgatttccccgtttttcccggctcttttatctccggcaccggaaggagaacgccgccaagccccgggccgtcttctacggaatcgactacttcatgtttgaaaaaaaatccatgctgaacgagctcgcggccttggaccgcgaactgcgggcggacgccttaaaccccgccggggccgtcaacgaggcctcctcgctcctcagccggatttcgctgcttttccggaagaagccggacatcgacgatttcttcggcgccgtgatcaagctggaccgggcaagggacgtcgccggggaggacggggccgacgccgtcgacgtattgaacgccggagagcggacggaccggccggcaccgcgccgcccctaccggccccagccgggggccgaaggcgccgatctgcggaaattgctggccgtcctggaagaggacggcgtcccggcgtatcttgtcatcctccccgacatcgcctccacgaacgccattaatttcgagcaggacaagtacaagtcggatatccggacgctggccggatcttataagaacgtcaccgtcctggacttcaatcggcccgaccggttcgatctgaacgacgccgcgctcttccgggcgacaaagggcccccggagcaattgtcatttgtccgaggagggacgaatccggttcacccgaaatctcgtcgaggccgtcctcccgttcttcgcccgacggggcgcggaagaaatccccccgaggtcaaggtcatgacattcctcagctattccttcgggttgttctttctcgcgtccgcagccgtctatcatgccgctccccgaaagatcaagccggggattctcctggcggccagcttggttttctacggctgggcgcggcccgtattcctgattcttctcgccggagaggccctggccgccttcggcttcgccctgtggctggagaaaaaggaccggcccgggcggcggatcgttttcgtcacggccctggccgcgctcctcgcgccccttctcgtctttaagtattcggatttcctcctccgggcgtttcgtcccggcgaagccggagcgctcctcggcttgatccttccggccggcatctcgttctacacattcaaggcgttgagctacgtcatcgacgtcggccgcggccggatctcggccgagagaaatcccgtcttggtcggggcgtacatcacgttcttcccccaaatcctggccggacccatcgagagggccgcccctctcctggcccagctccgcggggactaccgcttcgacctgggacgggcggccggcggattccggctcctgctgtggggcctgttcaagaaaatcgtcgtggccgaccggatggcccagtatgtgaacatcgtcttcgagacgcccgccgattacgccgggttgggattggtcatcggcctggttttttattcctaccagatttactgcgatttctccggatattcagacatggccgtcggcctgggccggatgctgggctttgaaaccatggacaacttccgttttccatatttcagccggagcatcgccgaattttggagccgctggcacatctcgctatcgtcctggctccgggactaccttttccttccggtctcctacgccctgtcccggaagatcaaggccggccgcgtcctcttcctgaaaaccgagttcgtcctctacctggcggcgatgtcggtcacgatgctgctctgcggattgtggcatggagcgaactggacgttcatcgtctggggggcggtccacgccctttatctcgtcgcctcccgggcgacgcagggcgtccggaaaagaaccgcccggcggcttcgcctccgccggagcggccgggcctggggatttttccggacggtcttcagcttcagcctggtcaccctggcttgggtctttttccgctcccccaccttggccgcggccggaaattacctgtcgcacatttcgtgggctcttccccggcggggcgtcggcgtcattctctttctgggatcaatcctggccgtcttcatcctggccgaagtcttgatcatgaaccggaaagcgctctggggggaccggcgggttccggccccgctccaggcggcggcctatgccttgttcctttgcctcatcatcatcctggccgccgacacgagcaatgaatttctctacttccagttctagaaggagaaatcccgggaaacgcgatccaagtggtccagctcgtccgaagtaagatcgaaggccatcgccgcggcgtttgaagccgcctgggacgcccgggtcgcgcctggaatggcgacgacggtgtcgccgtaaaaacgaaccagccaagcaagggccgtccgggccggcgtcgccccgtggcgggccccgatttccttcaaggcgtcgatgaccggccggcttcgccgcagggcgttcttacggtaatatccccggtaccgtctcattcccgaaatctcctgaagacgttccggcttgtcgtgaaaccgcccgctcaggacgccctgcgacaacggggaataggcgatgatcgtgatcccgagctcccgggccgcgtccagaacgccgtttttttcgatggcccggtcgagcaggccgcaggatacctggttggagacgaggggaaggcccgcctcggccaggaaacggtgggacgcccgcatgcttttggccccgaaattcgaaacgccggcgcagcggatctttttctcccggaccagggaagccatggcctccatctgtttccgcgtcgaggaaaacgaacccggatgatgaatctggtaaagatcgatggggtagggagcgagacattccaggcgcttcccgatcgtccggggaaggccggccgcggttcgaagaaggggcatccacttcgttgcgatgatgatttccccgggctttttcccggctttctggagaacccgggaaagcgcctcttccgaggcgccgtctccgtaggcctcggccgtgtcgaaccaattgacgccgccgtccagggaggcggccacgatgccctcgatttcccgctcggggagcttaggccagtacttgttccatccccggcgctggctgaattgccagcagccgagcccgatgggcgacacgaggagatccgatcgtccaaggcggcggagcggcaacggcatgagcactctccttcaatctttgacggcttcgacgtagaagctgtcctccggccggttgtccagggggaggaagggcggataccccgaatcccggtatcctcgttcccggacatcgtcgaagccgtgctctcggaggagagcgatgaacgaaggggccgtgtacatccatttgtgccggttcttttcggccgccggggaatctctttgaaaaagaacctgaaggaaatcgtccggattctccttgcgatagaggcggacagccgcgtccaagtccggcaggacgaaacgggcgaagccgcccggcttcaggcatcggcgcacctcgtccaggacggcccgggtctggaagaggtagagatgctcgagaacgtgggagcagaagaacgcctcaaccgccccgtcggcgaaaggaaatgtctttcgcaaatccaattttttcacccgggaaaacacgctggcccgatgctggtccaagcgaagccggtcgatcaggccgaaacggaagagaagccacggaagtccaaaaacgcgggtgatccggatatggggagtgatgtcggtgttgagccacccgtcggccgaccggtcaaaacagccgagctgaacccgcaacggttttcccgccgctgctccgcccgccccggccgtcttcgatatgcgggtcatgccggttcatcccgctttccgcgagcttattggaaataggccggagcgctttccgtccctcccttgccgagagtgctgacggcgaaggatcggctgacctggagattggtgaaggcgaacgaaaccgagaacgtggacgatgaaaccgtcaacagccggttgtaagaaccgtcgttctccctcatgtagagaacgtagccgtcgacatgttcggcgatgttgtccgggttggccgcccagtagagattgaacgtgatctccggattctcccagaaccgggtcatggcgatcgaggctgaaaggttgaccggcgggagcggcacggttctgaggacgacgatctgcttgatttcctcgtccgtgcggccgatgctgtcggcaaccgtcaagcggacgttgtacgtcccggaagcttggtaaacatgattgacgtttcggccggaggcggttcccccgtcgccgaacacccagtcgtaattgacctcctcgccgttcggtccaaaggccgcggcggcctggaacgtcaccgccaggggcggatagccggtggacggcgaaaaagtgaacgcggcgatcggcgcgggaacggcggcgatcaggttgagggaataggcccaaatgtcggttccgcccgaggtcaggtacgacgactgcgtcgcggcgacgttcccgtaaggatccgccgccagcccggccagcttcggataaacgccggcgatcgtctggacggcctgaaacgtccccgaggcgtcatttgtatagcggatgccgttgccggcgtcgcccctgcccgactggcaggccacgtgagccgctccgttccggtcgacgacgacccgggggaaatgattcaagcccacggcgatcgccaatcgagccgtttccccgaccatcatcacccggatttcggatcctccccccggcttgtccggatcaggaaggtcctcccaggcgacaaccggcacatggttcgtcccgaccgtcacccacggatgggcggcgcttccggattgtcccgtcaaggcttctccggtcgaccaggaagttgaggccgtccgcttggcataataattttcgtagttgtttccggaggatcccgaccgttcgacccaaacggcgtgggcggccccgtccgtcccgagggcgagggagccgtgctgcccgaaacccgtggacaattttacggcgttttcccaggcgccgttgatcttggagagcgcgtagaccgaacccccgacttcgtcggagaacacgacgtggatgttgcccgccttgtccatgaaagccgcgggttcgtccccgcccaagcccgtggaaaccgtctcgatcgcgccccagctcccctggacgtcgcggatccgcaaatggatcgatttatcggcgtcgatcccccagctcacgataacggatcccttgggagaaacggagatatgagggcggttggccagaacggccgttgactcggtgacgttgtccggaccccggacgaccgttccatcatacgacgcaacccagacgggaccgccgctgccgcggttggtatccccgggaacccagaccacccaaaggaccccgtcggggccgaaggcgcattgcgtccaccggacgcggtccgtcgtctttgagatcagcttcggatggcccagggtcaggccgaatgagaccgtcgccaaaaggagcacggcgccgatggatagaaggaatgaacgcttcatgaaagactcctccccttgaccatctgttttatagtgccaaggatcgccggtcttgtcaaccggcgttttcaatggccttgatcatcgccgaaatgcgggaaaggaccggatgacgggcctggggcggcgacaagaaaaagaagcgggcataagacaatatttccaggcggcttctcccggcccgaaggagagaccggcctggaggcttgaaacgacgcggccgaaacgcggggttgaattggaggccggccggtttctccggaagacgtccgccggcgcggcggcggcccggcgccgccgggacaacggaaggccggcctgatcccggtgtctggaggcggattcgggacggtcgcgaagcggcggcggaaaatcgattacgcgcgggaaaaatgggctttcaggcggtcgcggacgtcatccgacaaccgggtgaaggcgatccccatgccctggaacggacgttgccaggcgacgcggccttccccctcgatgatcgaatcgccgtccttttcgacgaggacgaagcggaaagcgatgatcgagccttcggggacgggattgatcgtgtcgatatataacccgccttcggaaagatcgctgagccggccttcgaaatgaaggccttcatgagtgtagacgatttccgtcattcgcgcgccgcgcgggcttcttcttttttcttggttcatggacatccttccagcctggcaagaaatgatccccctatattgtacatcaatcggccgtccttttcccggaacgcccggatgacacggtacgatatcccgcctttctccgccagatggaaacggcccgggcatcaccggctcagcggagccaaatcccggcaaagcttccgtcccagaaccgcggccccgcgctgggaaagatgagaattggtctttccataaccgccgtccaggaacaaatccggcttgtccaagtcgaaatcacgcggcgtgttgtagatcaggagggtgacgttgtcgtagcgccggctcaaatcctgcagatgacggtgaaagcccggcatctgccagttggtccgcagggagccgatataatccgggagcgagaccagggcgactttcacgccgtcggctttcagctcatccagaaggcgcaagaaatagtccccctccttgcccggcggcttggggaagcgctgcttgaaaaattggggcggccgctcggttctcagctttggattgtcgtccggggcgggcgccccggggtgcgtgttgatcttgtcgaacaagtcctcgtccccgcccgaatcagcggccggggccgtccggccgaggtcggtcatcaggttgttaagaaattcgtcgttgtgtttcttgttcttaaacagaagaaggggcccggccaagacgtcgaatccggcggctttctcccccaggttgaagcgcgacatccagcggacattggattcggcgttatagatgaaataatccacgccgtagatcacgagcttcgggacgccgacgcgctttttgtaaagctggtagaaataataattgtatttaggccccttcccccagtatgcttccttgaaaatcttctttcccaggcagctttccaagtgagccggaatgatgccctcgaacgtccgtgaagtcccgaagacaagaaccgcgggattccggccggctaagtagcggcccaaccgctgttcaaagtcgctctttccatacgagcgatgctcgatcgcccggacggccaaggaaagaccgcggtcgaaaacgagcagagccgccaagaaacaggccaggagggccagaaatcggagccgctcagaactggatgtagatgaactcatttcccgtatccacggcgaaaagaatgatcaggcagacaaacagggccaaggccgccccgcggagcggcaggggccgccggctccaccatccggaggatttatcgcttgccgccagccgctcgcctcccagaaggaccagaatcagaagaacgccgaccacgaggaagctccaaccggagggattgatcttcaattgcaggaaatgaagatacgcgaaggccttggaaagcgtcggggcgcggaagaaaatccaggcgaacgagatcaggttgaacgtcaggatcacccgcagggcccggaggagggccggccgggacgtcaagccggccttgcgggcccagcgccggcgacgcttgcggccgagctggccggcgatcatgaacgccccgtgcagcgccccccagaaaacgaacgcccacgtcggcccgtgccaaaggccgcaaagggtcatggtcagcaaagcggacgtgatataggcccaggattccaccttgaccccgaacaggcggtcctgcttgagaggccgcatcacggtgtaggacaccggcaggaacaggtagtcgcgcagccaggtggagagggagatatgccaccggctccagaaatcggcgatgccgacgctgagataaggccggttgaagttgggggccgactcgtagccgagcatgcgggccagcccgatggcgatgtccgtatacccggaaaaatcacaataaatctggaaggcatacagccaagcggcgaaaacgaggttcaatccctgcccgctcggatcggcgaacaccgggtcgacgaaaacggccaggcggtcggcgatgaccatttttttaaaaaatccccaagccgcctgcgaggcgccgctgaagatcctctcagccgagaacgtctcgggatgacgcagcaaagggaggaaacgccccgcccgctcgatcggaccggccgaaacctgggggaaaaaggaggcgaacagggcgaatcggccggcatgggtttccgccgggatccgcttgaaataaacatcgatcaaatagccgatcaggcggaaggtgtagaaagagatgccgatcggcagaatcattttgagcggcttccaggtccagcccgagccgaacagcgaaacgacgccggccgccgtccccatgaaaaaattgacgtacttgacggcgaccagggagcccaggatcaagatcagggcggcccagagccaccgtttccgcgctttcctcgcctccggcggcaaggcggccagtcgccgggccgccgcataagcgacgagcgtgggcaggacgagaaagagaagatggccgggatggccgtaggcgacgaaaaaaaagctcgccgccaggagcggcagccagcggagggatttcggcgtgagccagacaaggcaaaaaacaaggcagaaatagtatagaaaaaagacggattggagcagcatcggatcgagagattttactcaagtccgcgctgacagtcaacgaaacggctcctgtcaccggggaccgcgaacatctccgcccttccggcgttgaaaaaaaggagacggatccgtccccggaatccgtctccttcaggcgaaattccttagggcagctttttaaaacagaggaaccagtccaggcactcgtaggccgagccggcgccctcgacccggtccttggcttggccgcatgatcccggcggggggatgatgaccttgtcccccgggcgccaatcggccggagtggcgacctggtgcttgtccgatgtctgcatggcgacaagcagccgcttgatctcgtcgaagttgcggccgttggacagggggtagtaaatcatcgcccggatcacgccggccggatcaatgaagaacacggcccggacggcctgggtgttgctggccgcgggctggaccatgccgaagctcttggccacttccatcgtcaggtcggcgatcaccgggaacttgacttcaatgttccgcatgtccttccaggcgattttttccttgatcgtccggagccaggcgatatggctgaaatggctgtcgatcgaaaggccgatcagggagcaattgagggccttgaactcctcctccatcttggcgaacgtcataaactcggtcgtgcagacgggcgtgaagtcggccgggtggctgaacagaatgacccattttcccttgtaatcctccggaaaatggatttccccctgggtcgtcacggccttgaaggccggggctttctcgccgatcaggggaatccggggcttgctttcgtcgttcatgggaatctcctttataatatcgataatggaatcatatcatatttgtaaccattgtcaagtttattttcctcggaatcggccgggggcggagaagatcgaccgcctccgttctgaagagggggagccggggacttgggaaacgcggatcggccgggcgcttcgggggagcatacgccgggaaccctcgtgcggagcccgagctcagcccggccgcggataggccttccggatggccggccccccggcggacgtcgccggccgccggatttagtcaaaccggacgggaggccccggccaggatcatccgccgaatttccggaacaaagaaagaaatgaccgcgaacgttctgttccgccggctcaaggaaaatcctcaaccggttttctatcccggcagcgcgggatcgccaaaagggacgggaggaagcctcggaccggcgcttcccgttttgccgccggacatggtaaactgcgcccggaacgccgatcgaccggaaaggaggaagggaagccgtgtccgccgcccttctgatcgtcctgggaggagttcttcaagcggccggcctggctggctgcgttcttcccgtcatggccggcccgcctctcaatttcgccggtttgatccttctcgactgggcccgcggctggaattcgttcagcccggcgtttctcgtggtcatgggcctgctgacggccggaagcatgatcctggattatgtccttcctctttccgggacgaagcgatacggctcgagcaagcgcggcttctggggggccttcatcggcatggccgccggcgtgttcgcctttcctccgctcggcatcatcatcggggcgttcctgggggccgtgatcggggagcttgcggccgggaaggaaagccccgcggctctgcgggccggatggggagcgtttataggatttcttctggctatgggtttccgcttggccttgtccggcgtcatgacgttcgcctttgtcctcaagcttttataattttgtctcccatgcccggcgaagatcgatatgcgttttccgcccggcgcggccggccgggagtcggaggcgttccgtgagcccgatcccggcggtgaccatccgggaaatgaatccaggggacattgaattcgccgcggccttggcccgggccgagggctggtcaagcgagagcccggacgccttcgccgcctttttagagagcgacgcggccggatgtttcatcgccgaagccggaggcgaacgagcgggcgtctgcgtcgccgcggcctacggccggaacggcttcatcggcgagctgatcgtcagcccgcgcctgcggatcctgggcctcggccgtcagctcttcgaaaaagccctcggccgcctggacgcggccggcttggaaaacatcctcctggacggcgatcttaacgcggtccccttctacgaggcgcaaggattccggaagatctgccgctccctccgcttccggggaaggattgccggcaaaaagcacgatcatatccggcgcctcgatccggaggatctcgagccgctgtgcgccctggaccgagagctgttcggcgacgaccgcggctttttcctgcggcggagggccggccgattcccggatctcagcctcgtctcggaacgcggcgggcgactctccggctggatcatggcccggccgggaggcggattgctggccatcgggccctgggccgctcttgaaccggaagacgccgggccgctcctggagcacttggcctcggagcacaaagatgaaatcttccgcgtcggcgtcctggaagccaacgccgcggccgcccgccgattgcgctcctggcccggcttcgaggagggtgttttttcctggcgaatggtccgcggcccctccggccgcttgggcgaccatccggccctttatgcgatcggttccgcggcgaagggctgaattcaagaaggcggcgaccggctttccaggacgcggggcttgacgagggacagccccccggcttcgggcgaatccctcatccctcggctgggaaaaacagcccaagccgttctttcttgggaaacggaacgctccggccgcgaccggctgtcaagaacgatccgccccggatcccgcgatcaggctgtcactttcaggacatggtcgtgcggatggactttccggtcgaccttcagagccacgtcctggcccggatttccctcggacacgtttttatgctcgatttgaagcgatgtgatcgcctggctgaaatcggtcgagtgtccttgaaaatgaagcgtgtccccgacccggaccgtccccgtcaactgcaggacggcgactccgatccggtcgaaataatgcgtcactttgccgatcgcttcttctggcatcatgccctccttccaataccgcgccctccgctccgtcccttgcgggacgccctcgggaggagtctctcccaaaggactatagcatattcgtgccggcggattcattcggcccctttccccggcgacggcaaacgcgtccgcttcggatcaggccggggaatcatgcttcgatataaaaaccggagattgacgacgtaaaagccctcgatcagccagtccttgaacttctccggatcgggaaggcgcggaacatcgttctcgccggcgcccatccggatctcctcctggaccagggtcgtgagcgtctcgatataatcgatcatctctcgcagcgaatccgcccctccgacgggaccgtgtcccggcacggcgatggccgggggttcagggccagaatcctcttcagactgcttagcaacgactccggatcgccgtcccccaaataggggtgccgtttgacaaagagctcgtcgctcatgaaaacgattcggtcaccggggagagagacgatcatgtctcccgtcgtatgcccccgtccgacgggcacgaggacgatgtttcttttcgagccatgaatcgtcatcgggccctcgatcgtcatatcgggaagagtcatttcgatctcgggaaacgcatcgaccaaggctttgtattcggactcccgcaacgccagctcgaatctttcgattccggacgcccttatgagccggtcctgaacgattttcaattcgcccggaaccgtctctttttgggtatcgagatctttctggaaatgagtttcgatatacgcgcgggcgttcgccgtactgatgatgacggccccgggaatgaagacctgattgccgccgatgggatcgctgtgaggatccaggttgagaaccagcgaaacaggccttccggtcaggaattcggcctggcgcttcaagtcccgggcggccgtcggacagatgaagggatcgaggatgacggttcgatcccccaggtcgatgttccccgccttgcagatggcgaagccgcccaggtcattatggatcgccgcgtaaacgccctcggccggcttttcgagcgtgaaatgcctcgattccgacaaggcgtcccgcccggcgagagaaaaagacaacatgaagaatatcattaagataagaagaagaaacagaatcgttttcgagccggcgctcataagggatcgacgcctttcccgccttgacgaaaagataaaacggcgcctggaggaagtcaagaaacggcgaaagcggattggctccagggccggtcttgggaccggtcacggacgccggcggacaacggaaacgacaaaggaaaaaccggatcttgcgggaatcgcgggaaagggggcgtcccggccgctacggttcacgacgccggccggggcggccgcttaaactttggagatcgccgcggcctggtcctcgtcagcctctttttccatctcgatgccgagcaggttggcgatgccttcgtatacctttttcaaagacttcttggattcttggagttcggccagtctgagcctgactttctgcagctcgatctccacttcttcgtccagctgatcgagctgttttttgacgtcgtccagcgtccgccgataaagcgcctcttgatctttggtcatggacatggatttctccctttttcgcgaatcctcctattcgaccttgaagacgagagccaccggcatccagaccttcacgggaacaccgttgacaagggcgggattgaatctccatttccgcacggccgcctcggcggccctgtgcgttccactgtcatttttaattcccttgatgacttcggtatcaatgacattccccgattcgtcgatcaaggcgttaacggtgaccgagccctcaattttaagccttctggcgatttcagggtagaccggcatgacccttctgacgacggagggtttttggctgacttcatttaagggcactaactggcctcgttgaacggaaggcggagacggtttgacggcggggggctgtttgacttcggccggcggaggagtgaccgcttgagccgccgcgggaggaacggactccttgacttccggaggaggggcgctctcttgaaccggcttttcagcgggggttgaagccgccggcgcgggcgtgctttctctcttatctccgaccgtttcggccggccgctgaactttcgttgcttcgggttcgacggatcgaaccgcctcgggcgcagattcagggcgccgggccacgggtttggcctgagcggccggcggagccgccggttgctcggaaggccggggccgggccgtctcgatcttatcgacgggcttggccggctcaggcttcactgcgttttccggatcggtctcctggatttcggatccgatcgccacggtctcggagtcaagcatcgaaccggtttccaagtcggcggcgggttcgagaagagaggagccgcccgcctggacttcgttggtcgctcccggcgatccgggcttgagaattaagaacgccgcgaccgccaagacgacgacggcggcgatgatcacaaccggcttgaaattctttttcgccggttcctcgtacaggtcgccgaagggagtccgttccgtgtggacggaggattccgtccggggaggcggagccgccggtggttccggtttcggcggtctttcttcttttttcggggcgatcggttcggtcttccggatttccggggcgggaacgggacggcgcggcggctcgggagccggcgcttttttgggttcttttcccggggatttgatcagccccgtctccaagtcgaaacccttgagcgcctttttcaacagcgcatcgacttccacattccccgcatcgggcgtcctttgtttcggcttttccgccgccggccggagcttttccagcgatggcttggaggaggcgggaaccggcgggatgaactccggctgtttggattcaggctcctttttttccgcgaccggccggggcttttccgccggcggcttgaaggaggcgggaaccggcgggatgaactccggctgtttggattcaggctcctttttttcctcaaccggccggggcttttccgccggcggcttgaaggaggcgggaaccggcggaatgaactccggctgtttggattcaggctcctttttttccgcgaccggccggggcttttccgccggcggcttgaaggaggcgggaaccggcggaatgaactccggctgttcgaaatcaaattcctttttttccgcgaccggccggagtttttcctccggaggcttggaggaagcggcgaccggcgggatgaactccggctgtccgggttcatgttcctttccgacattaaaagcgccgttgacggcggcgaggagcttatcgttgtcgacgggcttcacgaagtaccgaaaaattccataagtcctcagggtctcggttttatagatcggatccttataagttccggtaacgatgatcacttgagtgcggccgagtgaatccgaccggattctctgacaaagctcaaacccatggattttagacaacatcggttcgagcagaacgacgtccggcttgagagccgagtactgatcccacccggcttggccgtctccggcgatggcgacttcaaagccgtaattcgtcagaagctcagaaacccgggtcgtgtccttcatgtcataatcgacgataagaacttttttctgcatcatccgcgcctttttcccgaagatcggatatcccggacccatatcgtgctcatgggatatcctccattgcttacatatatttctcctagcctgttccgatcaatcaccctttggggtgaatctatgggtgaaaacctgttttttctcccctatcggggccgtttcaagcggggaaaaatctaattttgcgggaatgacgcaaaattacgcggaaataacaagcccagttcaacgcccgcggcactccccggccgccctgcgccgcgaaaagcgcagagaaaaccgaggacaaggggatcggatcgaggccttcaggccgtggtcccgcaaaaccgccggttatccgcgaagaaaatccgcagccgccgggaaatcgtgaagatgacccgtcgatccggagcggcctcgcgcgcggaacgctcggatccaagcgaatccgcgcaggacaatcatccggccgggaggcatcgcgacggcgttctcgacgaccggccggaaaaatacatcttcccgctcaatgcggttctccaatcgtccggaaaggaagaaaaggaggaaattgcgcccaagcgaaaaacgtccgttccggacgtccgggcggatcatctcccccgcgctcaaggcggtcgaagaacggctggaataccggatttccccccggcagaaatcgatctctgcttaagattcgcggcgaatgaattataacattataaatcattgacatgcaaaatattaacataataagataagcgccttgttcgccttgattcggcggacggccacgtgaaaacgtgattggaaatatgaatcctggaattgaaggagacgaacaacatgaaaaaacacatcatgctcggcatttgcttcctgcttctcctcacgaatctccaattcggacaaatcctgggcaacggcaggctgctctttcaaagcccggagaaaatccgctggacgcaatgcgccttcacgcccgacggcaggctctgggtcgtctgggtccccggcacgaccaacgccaacagcggcggaccgatctgggtcgggacctacgatgggacgacgttttcgacaccaatcaacatgaccggcagcttggccatcaaggccaaccgtccccatatcaccacttcgtccaaagggcacgttctcgtggcctggggagtcgtcgccaccagatccacatacttaagaatctgggatcccaagacaaaaatctggggcccgattgagacggtggcctccaactacggcggcgacgaacccatcgcccagatggacaacgccggcaacatccatgtctttttcaccgacgaggcgggaggggtcgtcttcgcccgttccaagatcaatggggtttgggataacatcgcgatcttgaaccagagccgcggcaagcagggttcgctggtcatcgggccggacggcaaagtccatgccgtctggatcgaaaaagacccggactcgacctatcaaaattattatgccacccggacgatctcgaccgcttgggaaacaagggtcgccttgccgaaaaccccgaccaattccaatcacccctggatctccatcggctcgaacaatgccccgatcgtctgctaccaggatgttccgccggcggaaaacggatgcgaaatctatgtcctgccgatcggcggaacaccagtcagagtcatccccttcgccatgcagcatttcgggcgggttgtcgtcgacagcaagaacgacatccacgtcgtatgccagaccggcggcggcgacttcggcagcggcttccgctataccaataatgtcggcgggatctggaagccgttccaaaccttcccggcgctctatcccaaggttcacggcctggcggccgattccctggggaatgtggccgtgacccagtcctcctacacgacgtcaggaaccgacctctgggtgtattccctgaatccgattgagcgggttgatatgccgacggccgatttcacattctccccggccagcggatatccgccgctggcggtcgacattcaagccgtccccgcctttagtccgaacggctcggaagtcagctatgcctggacgttcagcgacggcggatccgcggccggccgtcagacgtcccatgtgttcgaaactcatggcatgcacacgatcacgctgaagatcaccgacaatctcggacggatggacgaaatcggcaaaacgatcgaggtgaagaaaaccgatccgcagatccccctcaacgccgagctcacgatcgtcatcggctcggtgcggagaaatctgaacatcacctactccctcgcttggcggatcaatccggccaataccccggcccacatcaaggggtatgcgatttacatgaaggaaggcgacggggagtacgccccgattctgacggtctcgccgagcacgtttgattcctcgttcaccttcaccgatctgaaggtgaagaggtatttcgccgtcagtaccctgggctacggcggcacggaaagcgccaaggtgtatttccagtaaagaaacgcggccggcggcggaagaaacccgccgccggccgcgccgttttcggcgtcttccccccgaagcctcgttaaaagctgtactgaattcccaagaccggctggaggtggagaaggttggcccgctttcccagcgtgacgttcttgggattcagataaaccccccgcaaatcgaacagaaggcccagcccttcattcaaccggtattccaagctgaggagcattccaaaggataattccgtgaattgatccttcgcgtacgtcatattcgcgaccgtgacatgggcggcgtcataaggggattcctcggtgaaatcaaagtcctccatgctctgcatggcccccaggctcaagccgatcatcggcccggccgcgacggaaagcgtttccgtattcaggaaggagaagagagcaaagacggaaaaatcccaaagcgtgtttttcccgccatcgctttcgaaggagacgttgcgcggcgtctccgggaggaagggatggggaaggccggccgtgaacgatcccgggtttttcagcgggctgtagtacccgataccgatcccgattttggttcggttgaagtatcgtccgaattgaagctcaaacgcggggaccgttctgaaggaataggattcagccagggtcgccgtttccccgtaaaggtcaaacgttttttcgacggagagatcctcccccacgaacaaggacaggccggcccggccggcgatgaaaaagccggaacgctcaagagccgcggaccgcgcctgaaccggagcgacgggggcggcgggcgccgttgagacaatcggcttggccgcctcggccggacgaggatccgaaatcgcggcgatttctccttcattccagaaggaaattttcaatccttcggcgccttgggtgattccatacgcgggaatcatcgggccaaaatcgaaaatgatctgaattttatccggcccggattgaacggctcgaacgtcgagcacgcccatatcgccgatttgcgtgacggggagaatctgcatctcggatatcggcgtcatgtctacgatcaagcggggcggcgaaggcaggaaagaggcttcgacgacatacgctccttcgactttgaacaaaaaattgagccgcgctccgtctttttgaagggacatttccttcaggacggaagtcgtttggctcatcgagattccggcgttaaaaaaaatcaagcccaccgcgaaaagggccggcgcgatttgtccggacagttttttcatctgatcctcctcttttaacttgcttcgtccatctcatccggaaggccctttcccggatttatcgaaaaaaatcgtcgacgacacggcgcttagtttattgtgttattattgtatttgtcaacggatttcaatgttataattcaagaagccggtcccgggggatttaacgaagacgagagccgcgatccgccgacggcggagacggattttccgttcattgcgtcgaaaagacctcgacgatttgctataatgaagcaggaagctatgcccgaacaggtgaaatcgaatcgcagcggccggcccccgaaattccgggagccccgccgccccgtgacaatgaccttgccggtgcgcatccttgatctcctcgctgaaatcgatccggaccgcgctcaagccgtggccaaagccgcggaagccgtcgccggagcggaggcggatcgattcaaaccggtgaagctcacggagatggctcagggcaaatccctgatcgtcgtcggaccgagcaaagccctgaaggaaatcccctggttgaagttgatcgaaatcgcccccacgcgttttctcctgagcattccctccggtacgccggtggaagcgctggaagtcgccctgcgcgatctgacgaacgatcccgttctccggaataacgaccgggaaaccgctattctcgccgagcttctgtcgttgatcggtcatcagaggcgcatgaaccggctgggcaaggccgagtttctcatcatcgacgcttaatgaacatcaacttttacttaaaaaaatatccgaaaagcgacctccaactcttaaataaacgttaaacgttacgttaaattcatctcggatatttcccaaggcgtccccttgttgacaacaaaaacaagaagtattagaataattatgtaaaacggttaaacgccaggagtatcaaatgccgcgttcaacaaaaaagaaatccaagttcgtcggaatgcgtttgagcgaaaaacagaacgaagcgttgagccgccttcaaaaagactcgaaagccagcaagagcgatgttctgctcagaggccttgagctcttgagcgagtactactcgctggacctcgacaagccccccctaagctttgatcttcgcagcctcgaaacggaagccatgcacctggccgagtccctcaagcaagtccgggacaaaaagcaagccatccaccaaatggtccaggagcttgccgcggtcgacaggattctggacaaatacgacggccgggagaacgccctcatccaggttctcctcgatatccaaaccgaaaaccactggcttcccaagccggccttgatctgggcttctgaaaggttgaacgtgccgctctcccggatctaccacatcgctacattttacaaggcgttcagcttggagccccaaggccgccatgctgtccaggtctgcctgggcacggcctgccaggtccgcggcgctaagcgcctcctggacaacgtcatcagcgtcctgggcatcgagcccggccagaccgatgacaaacagaagttcactttatcgacggtcaactgcctgggctgctgcgctctcggtccggtcatgaggatcgacgggcagtattacagcaagcccggcctcaaggacatcgaaaagatcgccgcggcctgcgactgaggcccggatcacaaggaaagaggcgaacatgtcgaaactgaaatcagcggctgaactgaaaaaattcaggcagactattctggacgggcgggacgccggcaaagtctgcgtgaccatctgcctgggcacgggctgcctggcctgcaagggcgacgaggtccacaaagcatttgtcgaggagatccgcaagcagggcctcgaaggcaaggtcgacatccggcggaccggctgccacggcttctgcgaaagaggtccgctggtggtcatcttcccgaaggaaatctgctacctcaaggtgaccccgggcgacgtcccggagatcgttgaaaaaacgctcatcgaggacaaggtcgtcgaccggctggtctttgccgacgaggacggccggaagatcgtccacgagggcgacatcccgttctacaaacaccagaaccggatcatcctgggccccaaccggctggttgatccggggatcatcgaggactatatcgccctgggcggatattccgccctggccaaggcccttttcgtcatgacgcccgtcgaggtcctcgatgaggtcaaaaaatcgggcctgagaggccgcggcggcgccggcttccccacggggaccaagtgggaaacgacccgcaacgctcccggcgaacccaaatacgtcatcgtcaacgccgacgagggcgatcccggcgcttatatgaaccggagcgtcctcgagggcaatccccacagcgtcctcgagggcctgatcatcggcgcgtatgccatcggctcccatgaggggttcgtctatgtccgtcaggaatatcccctggccgtggccaatttgaccaccgccttggagcaggcccgggagctgggcctcctcggcgaccacatcctcggctcggagttcagcttcgacgtcaccatccatcgcggcgccggggcgttcgtatccggcgaatccagcgccctgatgacggccatcgagggccgagtcggcgaaccgcggctgaagtacattcggaccgccgtcagcggcctgtgggagaaaccgaccaacctgaacaatgtcgaaacctgggccaacgtcccggcgatcatcaacaagggagcggcctggttcaacggcatcgggaccaagagcagcaagggaaccaagattttctccctggtcggcaacgtcaaaaacaccggactggtcgaagtgcccatgggcatgaccctccggcaggtcattttcgatatcggcggcggcatcgccggcgacaagaaattcaaggcggtccagaccggcggcccgtccggcggctgcattccggccgaatgcctcgacctgcccgtggacttcgacgagctggacaaagcgggttcgatgatgggctcgggcggcatgatcgtcatggacgagggcacctgcatggtcgacacggccagatatttcgtcaagttcctgtccgaggaatcctgcgggaagtgcgtgccctgccgcgaaggcctaaagcaaacgctcctcattctcgaccggatctgttccgggcaaggacgggaaggagacctcgagctccttgaggagctcggcgaggtcatgaccgaagcctccctctgcgccctgggcacgacggccgccaatccgcttctctcgacccttaaatatttccggagcgaatacgaggcccacatcaaggagaagcgctgcccggcctgcgtctgcaaggagctcatccgttattacatcgaacccgccaagtgccaggcctgcctgctttgcgccaagaactgcccgacgggggccatcaccggggaaaagggcgcgatccacgtcatcgaccaggccaagtgcacgaagtgcggcgcctgcctggaggtctgcccctcccgcttcagcgccgtgatccggatctccggccggccggtgcccccgcccgttgctgccggcaccccggtccagaggagaaagtgagtccgccatggaaaccatcaaacttgtgatcgacggaaaacaggtggaaacggagagggggacgaccctcctcggcgccgctcggaaagcgggcgtcgacattccgactctctgccacgacgaccggctcgcgccctacggcgcctgccggctctgcctggtggaaatcgaaaaaaacggccgaaaacgcctggtggcgtcctgcgcctacctggcggaggacggcctgacggtccggacggaaaccgaaaagatccgcaagctccgccggatgatcctcgagctgctcctggccgaatcctcgacagggccgctggagagcttggccaagaaatacggcttggaggaatcgcggtttgagatcgaacggcccaagtgcattctttgcgggctgtgcgtccgctactgcgccgaggtgaaaaagaagaatgtcacctgcttcatcggccggggcatcgataaagaagtcgtcttcctctcggatttttccaattccgagtgcccgatgtgccgggaatgcctgcctctttgccccagcggaacgctctattcgctctatctgaaaggtttcagtggaaagccggagactcccccgaaaaaaaatatctgatctccctgtcctcgagtaaaaagccccttccggacgaaatccgaaggggcttttcatttcctcgatccgcggggggcgggaagctttgtcgcccccccccccgcgccgatcgaagcgcggacctccttctctccggccgccttcccgcaggaatcaatcaacccggccgggataaaccccagcgtcgattttttcgtactatcctgtagagagggaaaatatggaccgcgatatgttttcatccccgcggcgatatctaaatttttccatggaggaggtgctcttttgagcaaaaagctactcgctctgttggttctcggcgggctcgtcttttcggccgcgctcgcccaggcacccccggaaaaaaaggcccccgctccggccaagtctcccctgccgatggaacagctggccgaagccatggcccagcggttggcggagagtcttcaggttaaaaccgcgatcggcgatccgatcaaagccgggaaagtcaccctcgtcccgatcatcatgatcgatatcggcttcgggggcggaggcggcggcgcgccccagaatccggaaatggaaggcaagggcttctatatgggcggagaggcccggccgttgggattcatcgtcgtcaccaagtccggaacgcgattcgtaagcgtcggcaagataccgcgcaagtaaggaggatgccatgaacgcccaacgagttctcatcgtctcttttttcacgctctttttcggcgcgggcatcctgatggctcaggctccgctcgagaaacccctcgcggatttcgaccgccttgtctccggcctcaaggtcggcgccgttgtcggccagccggtcacggtccaggacacggtcatcgtccccttcgccaagatcaagttcggtctcggcggcggaggagctatgatgtcgttcggcggcgggatgagcggcaagaccgtccctctgggcgtgttgatcatcgagggcgagaacgtccgagtcgaggttttcccggaagaagaaccgaagccgtccttgctgcaggagcttctcccgattctgctcgaggccctgccccaaatgatcgggaacaagatgccggggacgacaacgcccccgacgtccgaatccgcggcgggaacggcggcggccgctctcccgaaggacgcttccctggatcaggccaaaaaactatttgaggagaaaaaatatccccaagccctggacatgatcgaggccctgatcgccaaagagccgggcaaggccgatttccacgcctggaagggacatatcatggggaatatggcccagggcaatccgctcgacatgatgaaatacggaatgggcgcgatgcgtgaatatgaagccgcgctccagctggatccgaaaaacgcggacgctcatttcggccggggcatggccaggatgtccgccccccccggattcggcggggacttggacggagcgatcgaggacttcgaagcggccctcatcaagccttgccccgagacttattttcatctcggcgaagcctataagaaaaagggcctgaacgacaaggcgaaagaggcttaccgtaaagccctcgctctcgatcccgaatacgcggaggcgaagaaggccctcgaggagctcggctgatatcaacgccaggagatgaagatccctcggccgccggcccgaagccgcggggggcggacgtcatcccccaaacgaggggaagccgggccgcctcctccgcggccggaggataggccgcctcgggctggacgaaaccggcggttctacggcctcggcttccgcagttgctcaggaaccgggatcggccgcccttcgatcaagacgcgggcgacgcgcgtctggtaatgcagcggatcgcccgtgaagatcaccaggtcggcgtctttccccggctcgatgcttccgacgcgggaggccacgcccagaatctcagccgctgtcaaagtcaccgcccggagggccgtcggccggtcgagaccggctttgacggccaaggccgccgacaggacaagctcctccctcgcgccgatcccgagcgagtcctcggccccgatggccactttaatcccggccttgaccagctcggcggcgttgccgagcttgacgtttttcgtctcttcgcgtttcgggcccacgcccatcgatccgacaacgaccggaatattccggccggcgatctgatccgcgattttccatccttcctcggccccgaacagcacggcccgaaagccgaactcgtcgaccaggcgaagagcggtttgaatatcatcgacccggtggcattcgatgaaggccggaagcttgccctctagaagatcggccagcggttcgagatcgagattccgggcgaggggcgacgccggtttcgcgtcctttttccgggccgcggcggctttgtccgtctccgcctgccggcgtttgtggttatactcagcggcctccaacagggctttgcggacaacgtaggcgctgcccatgcgagtcccgggcaggcggcccttttccccgaacgcggccttcggtccctcgcccaacgagattttgacgccgccgggttcaagaagaaccatgtcctcggccgtgacgcctcggggcttgatgaccaccgtgcgggcgccgatcacattgacccggcccggcccgaccatgagcgtcgtgatcccggcccgggccgtttgttcgaaccgcttgtcgaagggattcaagtcatcgaggatccgcaggccggccgtgacgggatcggagatctcgtcgccgcccgcctgcccggccgaggcgaaggaatccaccagccccggcaggatccagccgccggccgcgtcgatgatcgggattcccggcgggatggaaatttcggacgccgctccgacggccttgattttcccgttttcgacgaggatgacgccgttttcgatttcgggtccggcgatcggaacgacgcggccgccgcaaacggcgaatgtctcctcgacgtttccggccgcggccgcgaccgtcatcatgatcaacaggatcaaacccgcgcccatttgtttcattttcatgttcctcttcacttcggttccttttccgcttcgtaaaccgcccggccgtcgataaataccatgaccacttgggaagccgggtcgaagggatcgccgtcgaagaaggccagatcggcgtctttgccgggctcgatgcttccgatgcggtcttcaagccccaaggtgcgggcgggattgatggtgatggagcgaagcgcgtcttgagggagcattccgtatttcacggccaccccggcttgacagcgaaggaacgcctgctggacgacgtcggcatcggtcatgatgtcgacttgaacccctttgtccttgagatagcccgccaagttgaccagccggccttggtcgtcgtacgtgatcatctgggggccgacgacgacgatgatcccgcggcgggccagttctccggcgaccttgtaggcatcgaccgcgtggcccagcgagagcctgaggaacccgaactcgtcggacaagcgggcggccgtcatgatgtcatcggccgagttgacgtggatatggaccggaatctcccgccggatcaccttgagcagggcttctttcttaagatcgcgggccgggacgtctttcgagtcggccgttccggccttcttccgccgatcctgcgctttcccgtactcttccgcctcgacgagagccttgcgggccaggaaaacggcccccattttcgtcgtcggcatgacgcccttggaggcatagtatcccttccggccgagggccattttcatgtcggaggggaaacgaaggatcatatcgtcgaccgttcctcccctgagcttgagaaccgctgattggccgccgatgacgttactgctgccgggcctggccgcgacggtggtgacgccctcggccagggcgttgcggaactggtgctgatcggggcccacgccctcggggtgaatggaatcgatgatccgcagctgaggcgtaatcggatcggatgtttcattgtcctcggtgacgccgcccgagggtcccagccccaagtgggagtgggagtcgatcagccccggcgtgacgacgaggccggcgccggcgatgatccgggccccggcggggacggagatgtcgccggccgctccgaccgccgcgattttcccttccttgatcaggatgacgccgttgtcgatttcaaggcccgccgccgtcagaacgcgcgctccgacgacggccgtgatctcttccgcttccatggcctggaccatgggcgcggccataatcagggcggccgcgatcgcggccgagatcgttttcctgtggatcatgggaatccactccttatcacgatttgcggacatgagccgaagcgtgccggccgccgctccgcccatgatatcacgcccgcggcctcgtggggagatccgctcggagcaggaagcaaggcccgcatcatcaacatctttatcccaagcggcatccggtgccctgaattgcatcaagctttctttaatatttcaagcaaccttaaacgagagtcttcgggaaccaaaagcatgccaggccgaaaccctgattattttgactcgtcgtgatagagtcgacacgacatcgatattttaacgccttggctgattgtcattctcacaaagcattagagccgaaagaagtccggaagtgacttctgagatcgccgcttggctcgaatggatctatttggcgtaaatgatcgagcgaatccggccgcttatcggtcgatttatcacttgccgtatcgctcactcatcggtacgttctcgaatactctttgcgcgtccttccgggtgatgacggtgtcgtataagccgatatcctctccttcgtgcttgtcgatcccggtatagcgaaggctggcatcctcgtagcgtttgaacttgtaaacggcatcattcatcaaggcgctgttgaagaccccaaggcttacgagcacctcgaagtccagtttcgtcaagcctgtcacttttttaaaaaggtccggttcgagttgagtaatgacatccttcagcgtcctctcgcgatagtcggtcaggtacataaagatgggtacccgcgtggcaaacttgatcaacttctcctggatctgctttcgcaggcttttgtattccttctcctcctcggtcagttctttcttttccttcgcggaaagctcctcgtcgttggcctccttgcgggccttcttcacggcctccgacttgttgatgatcgtctcgatatcccggttcaggttgcgaaaaccctcgatgctcatgagggcatccatcgccttcttgtcggacatcaggcggcgcaaggtgtcgttgtccacattcaccaggagggcgctttcccagcgccgcgccagcagggtggccgtcgtgccactcatggccatatcgagaatgccggcggcgttaatctgcttcatggaactgccgtcgtaggccagaaccggaaggaagctgatgaactcctcgaccttcttttccgggttggcttcgttcacgttcaaccggcaactgtagtcagcaatctgtctcaacgcgcgatccggggcgaagtcgaagacatagcactcttccttgatgatctgttcctcgttcggagacgcgccgtcagggttgcgcaccgtccagggcgattgcacccggaaggcagcctgaaagtaggtttccgggctcgaggagttgcggagcatgagaatccccgtccacggtcttaccgtcacgcccgtggtcagttttccgcaagacagggtaatggttttggtcgtaaggggatcatccattgccttttgcacgggcggcaacgcgtccacgccgattccggcggcgctccccgccgccacgatgaccttgtagtcatcatagaaccggttctgtttctttgccagcaagtttcgcatggcatgacaggctgccacgctcggcaggaaccagaaggaatgtgaaagcacgcccagcaaacgcgcgtccgagaacggcatcggcggcttctgggcgccaagtttcaggttgtcaacgctggtcggcataaacgagccgcggatcaggtccagccatttctggacttcatccttgtatttgaattcagccttgtcgccgacaccttcggccgaaaaaaagatgtttaggtcaaactcgttgaactcgccccgcatggagatttcccggatcgcgtccggcagctggtaggtcagcagcaccatgcggggcaaagcggcgtaggggttgtcggcgcctttccagtcccgtttcgagcgctgttcgtcggaatacgtccagttgaagatttgctcctcgatgaattcgccggaagcaatggcccggaacggcgtgccggacaggtaaagataactgtccgtgatgatcggcatgatgtcttcgtcgaaatcctcgatgccttcgccttcagcgaacttgcgctctctctcgtcttccgactcaaagagttccttggcgttctcccgccatgcgccgtagtggtattcatccagaatcacgcaatcccaatgcgtcgagtggacccattcattcttcgtcttgattccgccggtgctgggattgcgtcccaggtaatcttgaaacgaaccgaaacagacgaacggccgttttttgtcagtctgttcataggtcagtccgccgggcttgatgaattgccagcccttgaaatccacgtggcatttcaagtcctcttcccaggcgctttgcaccgccggcttgaatgtcaacaccagcaccttccgccagcccatcttctttgccaactgataggcggcgaaggtcttgccaaaccgcatcttggcattccagaggaaatgcggcggtttgttccggttgcccctctccctgcgccaactggcgaaataggcggcagttttctcgactgcctcaacctgttccggacgcatctcgaaatccagcgaccggttttcctcgttcaattgaccggtccgcaccgcgatcatcgcggccttgacttgatccaccgtgcaacggaaccactcgccctccggattcttgataccgttgagccgcagcatccggtgtacgtcatgatcggtgaacgccgttccgtcactccgcatggcggattcttcaagaacgatccgatacggcggcttgccgggcttcttcgtcggatactgctgcgccacacggctctggacgtccacggtcgtgtaacccaccttcagaaggcctgcgtattgcgggttcgtgtcctcgtaggcgtatagggtgggccgcgttaccggacggagcgggaagaaatccttactcatgctcaggccccttgatctgcttatgattcttgaccgagaccccgctccactcctggtggatgatgttggtgaggatggcgtattcctcctcggccccgatagtgtgatttttacagtactcggtgagcttgttgcgggttttttgccccatcatgcgctgttgaatccgcttttcgcttcggccatgctgtctccaaaattccctggcgcggttgatcgaacgtgccgggttgctcatatcctgaatccgctcgcaacccaccttcgccaaccagagtttgattggctcgggctttaggcttgggattgactggatgaaccgtagaagtgtttttgaatcagcgccatcagttcgataataatttccgtccgtcgccggcatcttcagttggtgataatttgtcaccaactgacttccctctttttttagtcgctcctttagcttgttccaatatttcctggccgtttggtaatccggttgctgaattaaagccgcaatgatgtctatgactgaaaaataccatgtttcagaattctcatcataaacacggcgaatcttaaaattctcaaagacggccagcgcctgattatgattcgtcattcccccccctcaatcatcgatgttaatctcaacggccatcaatatgtcgatgattcaatgccatgatatttccaaatatccctctacgccattcatggaaggtttttcttattcatcgctcgcatccatcgggcggatcatggactcaatgaaggcgatctcgtcagcagtcagtccatatcgattgtagagtttttcgtcagtccattgaatattcatgtttaaaacaggcacgaagaaaaaccgatccttggtgatatcctgagagaatgagagttgcgcgactaggaatctaacgaatcgcgtgcttaggtattgtaataagctttcagcttcggctcgtttatcgaacacacccgcaacgatgtaagtttcggtgcatattgtgctcggtggcagaatatcaacaatagacaagactttccgcattccgttcttgtcgggttgtcctgcgtgatcatatgagaccttcgacgtaataactttccatttgtcaatcatatcaataccgacctttatgtcttcgcgggcatagggaccctcgccgttgttccatcgcaggacaagatctccttgtttcataggacgcacgtttgtgggcaagccaaagggttttcgactcgtcacttgctcactcatccgtttctcgttcttggcaagaaccttccgaatgatagggagtgcttggctgtgtcttacgaaggttttgaattcgttgagtgggcgtactgaaacaaagcgttcctcattgcggacattgatgacttcgcaaggaccacgggaatcgcgttcccaaagaaagtaacaaatgcctcccgctatatctacgcctggaaatatttcagaggcattttcatagtctacaatcttccggatcctatcgtcatcaagcattttagatcgaaagtcgttcaaaccttttccacctgcaaaccatcttgagggaataatcatggtcaagaaccgcggattcaatttcttggcttgttgaacaaagttctggtagatcggtgatgcacttcgaccaaaaccgccatcgcttaactgatacggcggattgccgattataacatcgaatttcatgttgaagatttcctccggtttgttagtatgaataaaattgtaagcatggctttccagttcaccgcctcttgcataattttccttattggccccgcagcaaacgcagcgccccttagcccaggcatgttccacccgcttgaatcggatattgccatcggacctgttgaaagtttcgcagacggaatatttaccgttggcggtcttggagcagtacacggaccggcgtgacagcagggcggtcaactcggtgacggcaagtccgtaaagctggtttttgaagatgtgattcatccgcttccggcggtcggggatttcctgctccagccctttatccaagcgcttggcgatttcgcgaaggaacacgcccgacttgcagccgggatcgaggaacgtcgccttttgatcgcgccaaagctccgccgggagcagatctagaatccggtttgccaggtggggcggagtgaagacttcatcgctgctcaggtttgcgatgcaggagaggacatcgggattgtaaccactattgttggacatgggcgatctccatgaaatgaaccgggggatattctttctccggcgtcgggatgaacacatcttcaccaagatcggagaaaagaggcagttccttcctggtttcgtgtgtcagcagaccatgaaacgtgtagtccctccgcttgagcatgctcccgttaaccggcgaccactcggaaaaaacaatataatccggtttttcgccgaccgtctcgagggtcagggcatcgccccagatgatattgcggtcaagaatgaatcgaaccgcctcgcggcactcgttcttggcgctgtttttgaacagccgggaataataatcgcaatcgaacagtccatagagccggtgtcggcactggcggacattgtcctcaaggatgtcaataccatagatcgaggagacggccaggacggcgtaacgttcgaaatcaagctgcgattttccgtagcgtttttccacgatcgcaagtttacgttccaaaatcacgatcaggaagtttccggttccgcaagcgggttcgagaaaacgagactcgatccgctccgtttcctgcttcacgagatcgagcatggcattgacctcccgcttcccggtcaatacctcgccgtgatcaacgacccgtttcttcgaaacgatttgcgtatccactgcttattgtttgattttaatatctttatcgatgacagtcaaagcaattgcgcggtgatgaacgattggtttatctcccgacccaagaagatgatataaaaatgatcttgccgggcggcttgctcgaggctttggaagcgacattacagtcgcaggcggcctatcctgaaagccgaggaaaaggaaatttccttagttttcacggtcggcagcggccgcaataagaccggaagatttccgtgctgagataccgctcgcccctgtcgggcagaacggtcgcgatgaccgcgccgggaaaatccgcggcgattttccgggcgccggccaccgccgccccgctggacaggccggcgaagacgccggcccgggtcacgagctcccgggccgcgacgaacgcctcctcatcgtcgacggcgatgatcccgtccagaagggaccggttgaagatggacggcttttcggattcgctcatgtttttcaagccctgaatgcgatggccgggaagcggctcgactccgaaaatcttgatcccgggcttggccgccttcaggtattcccccgcgcccatcaaggtgccgcccgtgccgaggccggccacgaaaacgtccacctccccttccgcctggcggaaaatctccggtccggtcgtttcgtaatgagcccggacattggccggattggcgaactggtcgggcatgaaatatttcccgggatcggcggccgccagctcccgggcccgggcgatggccccgtccgttccggcttcggccggagtcaggtccacctccgcgccgaaggcggcgattatcgcccgccgctcgctggaaacgcaagccggcatcacgagatgggcttgatagccgagaacggaagcgatcatggccagggcgatgccggtattccccgacgtcggctcgagaatcgtccgctccggccggagaagcccttgatcctccgcttcccggatcatgaacagggaagtccggtccttgatggatccgcccggattgaggccttcgatcttggccagaaggcggatcccgtgtttcgcctcaaccagcccgctgatatccaccagcggcgttcggccgatggcttctaaaatattcacaaggcgtttcatattcatcatgctcctgtcgattgacggacaacgtcatggaaagaaaaacggcggcgggggcgggggattcagcgggcggcgggtcgcccgcagcagagacagccgagaacggagaaccgggataggattccgcggtttctttggctgtcgatcgtcatgacgggcggcattttagcgcattcccgggccgccggcaagaaaaatcttggttaaacgagaggatcggcatcataggcgaatcgattcagggccggcggcggtcggatcgaggccgcttccttgtgtccttgccgtcccgccgggagccccgtataatcgaggccatggccgccgcaagcgaatgcccgatctgcagccggctccgggatgtcgaaacctccttttccaagtatctcgccccgcagctcgacaatccgcttcccgaagcggccggacggctggtcgttcttcccgatccctcgggccaagacccggagaaacgccatacccggcgctgccccgcctgcggcacgctctacgattacgtcagctgttatgaatatcacatgaacggcggcgaagagagcgaggagctgacgcgcctgaatccggaccaatcggcctcgttcctcttctcccaagcccgcgccctggaagaacggcgccgcgagatcaatttgctggaggactcggccggcggcctgggcgacctcatcgaccgcggccggcccgaagccggagaagtccgggaggccgcggccgaaatggaaacgcttcggcggcgggccgattcgctgcgtctccggctgcgggagctggtcgaggcgcttcgccgcgcttgtccggagatattatttacttgggccggagctcacggccgcgtctgccgaaaatttctggacgctccgggcgacggcggcgaagacagccgcatggcccgcttcgaagcccgctcctccctggatttttgggaaaagctgcctttcgggggagaaacatatatcgccggcaactccccctggcttccgggttacgacgatttattggaccgtgagctggctccggaaagatagggagaagagcatgggacgagggacccggttctcctcccggctcacttccatacttgggaaaagacccggaggaaatttccgcccaggatcttgcggatgccggcgtcgccgtagccgcgctttcccaggcgttcggcgaaatggacgacatcggcatattggctgaaaccctccgccatccgaagcggggagcgcatattcgcgctgatatgcttgtcataagatccggtcacgtccttgagggccggcgtgccccacgggtcgaccttatgctccggatacgttcccaggctcatgtccgttccgacgccgatatggtcgacgccgccgacaagctgggcggcatggtcgatgtggttgaggaaatcatcgacggtcggccgcgtggtccggcccttcttgagaagcatcgggccccaggggcacaaccccacgactccgcccttggccgcgcaggctttgatccggtcatcgtcgatgttgcgcggattggacgagacggcttcggctccggagtggctgaagacgaccggttgagcgcttcgctcgatgatctccagggcggagcgggccccgacatgggaacaatccagaagcaatccgaggcggttgcattcggctacggccagctcgcccagcgaggtcaatcccccgtcggcctggtcgaggcagccgccgcagaggcgattgctctggctgtaagcgaaaatcagcatccgcaggcccaagcggtaaaaggcctcgagcctatggagcttgtcgcccataaaatccccgcattgggaagccaagagcagcccggaccggccggctttttttagatcagggatctcggcggctgtggtgacgacggccaggttcggatgcttgcgggccgcggcgcgccaaaacatcagcccttccagggcctggtccacgtccaggtgcggatcccaggcggtgacgccgtaaaccgtggctccgtagcgatgggcgtcggcgaagggcgcgtcgggccatatctgcatgcaggagtcgatgaaaatatacgggtgatccttttccaggatcgggtggatgccccgctcctcggggctcaatcccccggaagcggcctgcggctcgggctgtcccgtattcgcggacgccgtcgcaaggccggcagccgccgccgtcgcccccatccccgccaaacgaacgaaatccctccgagtgatgctcatgccgcgctatcctttcttcaaaacgattgcttcaacgagttttatacgcgaggccggcggggatgtcaaaaccggagcggatcattcaaggggttgaatgaccggccgaccatcccatcgcccgttttctctaatccaccataaagaacagattcaaatccgatccgccccggatcatggagggcctggagagaggaatcgaaacttcagcgcctccgggccggcggtccgtctcaacccggccaaagcggcggacggcgcccgcagaaagacgctcatgggaaaacaggttgtttccaggggggggcgattctatgataaagtcatcccggtgtttccacgcccggaaaacgctcgtgataaccgcgggggcttggagacgcgaagggcaatgaaaagaatccaaggcggaaatctcgaggagcctgccgtgtcccgcggaggagaagccgcatcgagggatagaaaagcataaaaacggcataaacaaaaaatgaaaaggccgttcatcaacggactgggtttattgggcgtcgtcagcctgctttcctacgccgccgcggttgtctgggctccatcggcctatcccgggtatgactggatgaggcaggcggtcagcgatttgagcgcggccaacgccccctcaaaagatctgtggaatcaattgagctgcctttacggcgtgggcggactggtttccatcatgatggcgtgtgttttcatccagggaaaattgaataaaacgctgcgaatcggaatttatgcttttgccgcgatgaattgggtttccgcggtcggctatcccctgtttccgctttccaccagcggatatgcgggatcattccaggatatgatgcacgtgtacgtggtcacgacgctggttgtgatcctttccctcgtttcgctgattttgatcatggtcggagggtatcggaggaatggttatcgatccctggcgatttgggcgtccatcgctcttgccgcgatgggcgcgggcgcggtgggaacgagtgtggccccgcgcgggtatttcgccctctttgagcgtctcagcctgttcgccgcgaccggattcaacgctgttctgggagtctatttattcaacggatttcgttctcatcgttccgagctcgagaaagcctgaacgggtatctgaaaggccggcttggtgcgcgcggaagcaagtcaaagagaagaccgggatatggcttccctcggatctccggcgaaatccgaggagaccgcgtctctttcgatctatccgcccgccggtcccgtgaatcaacagatccgccgaacgatgatcgtctctttccatggggttgctccgcattcttcgatcttgcggatcgtcaatcgcccgcaaagcccgttctttaaaggagaaatctcggacaatgcatgtcgaaaagccgataacgatcgattcaatgaaaagccgcgatctttccttgtcgaaagtgatgattttgatctttgtccccgcaaccgtcttgacggccgcctattgggccatcggtcatctgcagaagatcattccttcgctcttattgttctttcttttagcggcgatcatccttttccctgctgaactggcgatcatcctcttcgccgggaaaaaggagttcggccgttattcattgaagagcgcccttgtgaatcagaaaaagccgaaagcggcgcggacccttctgatcggagtcatgctctttggcttggcgggaattctgtcgattgtcgtgaagcccttggaaagccttctgacgtcgccgatatccggaaaattaggggccgtcttgcccgcgtattttgactggacgaatttcgagctcttgagacagtatcccaagaatatggtgttgtggacctgcattgggtacggcgttttcaacgtgtttgtcggcccggttgtggaagagcttttttttagaggatacctcacttcaaaaatcagccgatttggaagacgcgcgccgatcatcatgaccgtcctgttttccctgtatcatctgtggctgccttttcaaaaccttttccggatcagcgcgtttttaccggccgcgtacatggcctggaaagaaaacaacatctccatcgccatcgtatttcattgtttatgcaacttggtttccacggtcagctttatcctcgttttatattccgtctagagaggaagacgagattcatcgggggaaaggacacggcctcgttgaatacgaggggttttctcccgcgggcggatcattgcgccggccgccgggaaacggcctgccttgccgggcgattttgaaatccgccgggtcgaattccgcacaagcgtcagaggattccgtatcccccgtttcgcggatcggcgaaaaggaagatcttcgggggaaaataagtgaacagggcgaaggcgaggaaaagaagaaccaaggcgaaataagccagccgccgccgcgtccggggctggggaggagcggtcaggatccgaacgctcgccgcctgtccggcgcagacggcgacgacaaacaagaggatgtcggcccaaaggaaatgcctccccaggaccgcccggtacgcgtagaagacggcgccgatgacgaccggcatggcccagaggccggcggccttcgcggtccagaaattcccggtccgctttttcagaaacggaagctcgaccagggcgaagagcagggccggccagaaggccagcttgaaatgctcccacgtgctctcgttgaccgcggccagccaagcgatcggacgttgcttcccgctccagacgaacacgaaatggagggccgagccggccaagatgatgaagaccgcctcggccgcttcccagacggcgatcgcccttcggtctgtcgtctgatgcatccgcaaacctccctcagcggcgcgaccgcttgacctggaaaagcaagtcgtcggccgcggccaggaccgcggccacggcggcgttcgtcgccggaggaacctccaccgagccgcaggcggcggtgacggtcacggccgcgcttccctcgcccgcctgacaggccaagccgctgatgcggccctcaaccgatttcagggccgccccgtcggccccgggcagaacgaccaggaactcgtccccgcccaagcggcccagggcgtcgccgggacgcaggcactccttgattttcccggccatgtccttgaggacttgatctccggcggcatgacccagggtgtcgttgacctgcttgaagcggttgaggtccaccatgatgcagcccaggcggcggttcccgccgcgctccggcttcaattcccgctcgaggaaggccaggacggcccggcggttgtaaagggcggtcagcgggtcatacgcggccaggtattccagctcggccgtccgcttgccgacctcacgttggagctcgcggttgcggcgcagaagcaggagggtccgccagcggtaggcggcgaaggccgcggccaggaggaagacaaccgcgcccgcgcggaacgccccggtcatccagaacggcggccggacgcggatgggcagggtaacgacctcgccccagacgcccgactcgttgaccggctggagaaggagcttcaaatcgccggccgggaggttggtgtaacggagctcctcccgccggctcaagggcagccagtcgccctccaatccctccaggcgggcgcggtaggcggcccggctgcggcctcggaaggagaggacggcgacgttgcagacgatcgtccgctcgttccaggccaggtcgagcccggccgggtattccaccgtccggccgggcaggcggacgctttcgatcgcaagcccgggcggttctgtattggggatgcggccggtcggattgtactgggacaaaccgttgacggttccgatccagatgtctccgcgtgaatcgttgaaaaagccctgggcgttggtttcccagtcggccaggccatcgtcgggcgtgaaggcctccacccggtactcggacaggaagcggaaaacgccgcgggccgtgttgacccaaatcgtccccttccagtcctcgccgatcgagaacacgtgatgattggcaaagccgggatgatccttcgcgttgaacaggcgccaccggccgccggcctcgagcacggccaggccggcgtcgttgccggcccagaggcggccggcgctgtcctcgaggatggaggagatgttgaccccggtctccaggggacaacgggtttcgagcggggcgacggtttcgccgtcgcaataaaagaaccggctcttggccacggcccagacgccgccccgccggctccgggccaagtgatggacggctgtcagaggttcccccgtcacggtcgtattccaaatgcgccacgttccgccggcatcgcggcgggccaggccgccgccgctccactcgccgcacccccagagattccccgctccgtcgagaacgatgtcgtagggattcgtccgcgggaaggagacatggggaggcaggggatggacggccttttccccgggccggcggaaatggagggcggtgtcggtcagaatccaaagggttccatcggcggtccggagcgccttccagacccactcgttgtccagaccgtcggccgcccgaatcgtttcgagaacccggggatgcggccggaccaggtagtgggccgctccgcgcatcgtccccagccagagcgagtcggaatcctctcccggagtgatgccgaaaacacaagcgctcggcaatccctggttgccggtgtggttgatcacggccaggttgctcaggcgggccaggccgccgatgtccgtgcccacccagacgcttttctcccggtcctcaaggaccacgctgacgaggttcgagggaaggccgttttcgaccccccagtgttcgaagacggacgcgccggggcgcttgagaaacacgccgtcgtcgaccgtggccgcgtacagcgttcctgacggctggacggtcaggctgtatacggcccgtggaacgggggaaccggttatcttgcgccagtccgccccgtcccgcagccagacgccggccccggccgtgcccaaccacagcccctcggcggtgaccgccaaggcccggaagtccgccggttcgagcccggccggagaaacgaccgcatcgggcggcgcgtcgccggaaaagcgccacaagccgttggcggccgcgaccagaacgccttcgcggtcggaaaggatgtcatagaccacgggtcccttctccccgcttccgggatggaagaggaaccaggtttccccgtcgaagaccgccgggccgtcgtcggttccgacccagatacgctttcgggcgtcctcggccaaggcccggcagcgaaccatgctcacggcctgatcggggaggatttcgaggcgacggccggcgattcgcgagacgccggccactgtggcgatccacagggtcccgtcggacgcgaccagcagctcctggatccgggtgctcggcaggccgtcctcgcggaagaagcttttgaactcagctccgttgaagcgggccagcccgccccaggtccccacccacagataaccctcgcggtcctgagccagggcagaaacctgcgactggggaatcccctccttcaagcccaagacctcgaacgggagaacctgggcgcgggcggggagggccaaagcgagaagcgccgcaacggcggcggccgggacacgatttctcagtaaataacctcgcatctattttccctttttgaaatgaagccgttgcctggcggccggcggggattggcggccgggatctcgagggtcgcaggcggtccggcggcggggccgagggataggattttcttttctccgcggatcatcgccgaaaagccccgtcttgtcttgaaatcccatcctgccatcgggaatgaggataattgagcgtttgaggagttgtcaagaaaagaaaaggccgtttgccaggaagcccctctcgcggcagcggacgccctcctccatgagctttgccctcctttacggcccttggccgtcctctccgggccctgtcctcgccaaaaggcccatctaaaaaggattggccccttgactaaaccgggccttttgacgttgcagaaaaccggcgtattcactttgtctttacagacgaaataaaactcttgacatccggagcgcgaagccttagattttactcggcgttaatattattgattattagtaatattattatactcttagtatttgtcatttgaacgggaggagatgatgagcaagaaactctttccattcgcggttttcatcgcggtttttctcggggcggcgttcgccccgggccagtcggaggacccgaaagtgcgggagctggcccgcaagatcgacgacctttaccggagcgattcgagctatgcccgcatcgaaatggaaatcgtcacccccgattggcggaggacgctggccttgaagggatggacccaaggacagtcgaaaacgctgatccgcatcctggagcccaagaaggaagccgggatcgggactctccgcctgggcaacgaaatgtggaactacctgccgaagaccgacaaggtcatcaagattccgccatccatgatgatgagctcctggatgggctcggacttcacgaacgatgatctggtcaaggaattcacgttcgttgatgatttcacgttccgaatggtgactccgccggaggccgaaaagggaattctctacctggaatgccggcccaagccgggagtggccgtcgtctgggacaagatcgtcatcgccgtcgctgaagccgatacgctcccggtctggcagaaattctatgacgaaaagggccaagtggctcggatcatgagctacagcgaggtgcgaaccttcggccggcggaccgttcccgctgtcatggaaatggttccccggacgaaaacgggctgcaaaaccgtcctgcgctaccgggagattcaattcgatctgtccttgaaggacgatctcttttccctgcgggcgctgcaatccggcaagtagaggatatcccatgataaaaatggctttccgcaatattttccgccagaagcggcgttccctcttgaccaccctgacgatgttcggcggctttgtcctggcttccctggccctgggagtcatcgacggaacgtacaaccggatcgtcgacgagttcaccagaagccgcatgggacacatccagattcacgcccgcggctacctggaacgcccgaccctccaaaaagtcatccggaacggccgcgagatcggcgttgaaatcgaccggtcgcgggacgcggaggcgtgggcccctcggattatcgccgcggccctggcctcggtcggagaacggacggatacggcccggatcctgggcatcgatccggtccgggagaacgcggccacccgctttgagagaaagatcacccggggccggagcttttctccggatccctcgaaggaaatcattctcggcccgggtttggcccaggcgctgaaagccgcgattggagacgaggtcgttctggtttctcaagccgctgacggatccctggccaacgacgtctaccggctcatcggcctggccgacaccggcgacatggcgaccgaccggacttccgcctaccttcatctcgaggacgcccggagcttgttcgttctcgaggaagcggtccacgagatcgtcgtcgtttcccgttccctgaaaaaagcaacgaacctgaacgcctccctccgcgaatccctggccgcctttccggtcgacgtccaaccttggcaggagttcgccaaaagcttttacaacgccatgcaagccgacagccgcggccatgaaatgatgctcctgatcttgtttatcgtcgtctcgttcggcgttctgaacacgactctgatgtcggtcctggagcggcggagggaatacggcgtgctgaaggccctggggacgcggccccggcaggtcttccggctgatcctttgcgaagtcctgcttctggccgcggcgagcgtcgtcttgggggccggggccgggtttttaatcaattccgccgtcgctcaacacgagattgtgattttctccaagggggtcaccttcgggggaatggagatgagatccttcaccacggaggtcaatgctcggacgttggcgatccctgccctgaccgttcttttctccgcgcttttcgtcagtctgtggccggccgttcgggccgcccggaccgagccggcccgctcgatccgcatcttctaggaggaccatcatgagcctctattcgcgacttgcctggcgcaatatcttccgcaacaagcgccggacctacatcaccggaatcgccgtcgccgtcggcctggccgccttgatgttcctggacgcgctttatatcggcatggccgataatatgatcgccgcggccacggcttccttcaccggcgaggcgcagatccacggacgggatttcctgctcgcccgggacgcgaacctgaccgtggccgggagcgagcggctcctggccgacttgaggaacgatacgctggtcaaggcgttcaccccgcggacgctgagccagggaatggtcacctccgcggccaacgtcaatcccgtcctcctcgtcggggtccgcccggacaccgagcgggctctcagccagatggacgacgtcatcgaggccggcgattacttcggcgggaatgacccgcagaacatcgtcatcggccgcaaactggccgatctcctcgaagtcggcgtgggcgaccgggtcgtggtgaccgtctcccgggcgggaagcggggagctctcccaggacctgtttcgcgtctcgggcatctatcgtttcaacaccgacgatctggacgacgggttggccttcgtccggatcgaaaaagcccaggacatgctcggcctggccggccgggtgaatgaaatcgctttgtcgttcaaggatcctcgcgtctcccaggacgagacccatcctttctggacggactattcgaccggggggaacgaagccctgggatggccccggcttttcccggccctgaaatccgtttatcagatgacgacggcggccagcctgatcctcggcttgctgctcttcaccgtggtcgccctcggcatcgtcaataccatgttcatgtcgatctacgagcggatgttcgagttcggcgtcctgcgggcggtcggaacgaggcccggaggaatccgccggcttgtgatcctggaagcgggatcgctggccctgttgagcatcgctctcggcgtcgggctgggattccttgtcaccctgatcgtttccctgaccggagtgaattatcagaacatcgaattcgccggggtgaccatcaaggagctcatctatccggtcttccatctcaaacagtacgtcattttcccggccggcgtgcttctgttcaccctgctggtgggattatacccggccggcttcgccgcccggatgtccgtcacccgggccatgaaaagaacgatgtgaaggagaacaaccatgaatccccaacaccggcacctcatcgaaacggagggacttataaaaacgtattcggacaacggggtccaggtcccggctctgcggggcgtcgatctgaccattcatgccggggaattcacggccatcgtcgggccgtcgggctcgggcaagacaaccctgctcaacatcatctccggcctggacaaacccacgtcgggcaaggtctggctggacggccggctcgtctcggacatgagcggggcggagctgtccgatttccgccgcgatcacatcggattcatcttccaggcctacaacctcatccccgtcctcaaggtcgaggagaacatcgagtacatcatgcttcttcagggcgtgcccaaggaagaacgccaccggcgcgtccacgacatcctgcgcgacgtggacctcgaggactatgcccatcgctatcccaaccggctgtcgggcggccagcagcagcgcgtggccatcgcccgggccatggtctctcatcccttgatgatcctggccgacgagcccacggccaacctggactcgaaaaccggcgcggatcttctggacatgatgcgccatctcaatgcggagcatgggatgaccttcatcttctcgactcacgaccggatgatcgtcgataaagccaagcgggtgatcgtcattcgcgacgggatcgtcgcgagcgatgaaacccggaattgaggccgcgatgagaagaccgcgggcatcaatcggggccggagcgctggccgccgccctggccatggcggcccttcccccggcggcggaaggagagctcaagctcggcggctacctgaaaaatcattcggtcgtcttccgcctgcccgaatcgaagacggccgcttcggacctgccgctcccggggatctcccaatttcgcctccgggtgttcctcgccggggacctgtcgccggatgtctcgttccaagcggcttacgacctttcgccccggatccaggatacgcttttttttcgggcctcgccgtttattccgtccccggaagcgggcgattaccgggcggccgatttccgctcgcgcctcgtcccggcgccgggaaagccggccggaagcttcggcttctatcacaacctcgaccgcctgtcgctgtcggtcaagatgacgttcggggatctcatcctcggccgccagccggtggcctggggaagcggccggatcacgaatccaaccgatctcatcgctccattctccttccaggaattggacaaggaggagcgtttcggcgtggacgccgtccgcctgaggattcccctgggcgccttgagcgagctcgacgcgggggccgttttcggccgggacttggagttcaagcggagcgcctttttccttcggggcaaggtcaatgttctggagaccgacgcggccctcctccttctcggatttcgcgaagacctgctcctgggcctcgacctggcccgctccttgggcggggccggcgtttggctcgagggggcttgcgtctttccggacgccttgaacggaaaaaagcccaaggcttcaagctatgcccgccttacggtcggtatcgaccgcagcctgagcgaccgtgcttatgccttcttcgagtatcattacaattcggccgggtcctcggagcccggggattacaccgccctcttttcccggccggcttatacgaggggagccgcgtatctgatgggccgtcattaccttgccgcgggcttgacctggcaagcgacgccgctgatccccgtttccgggctcctcctctggaatgcgaccgacggctcgctggcgctttcgccccaggcggaatacaatatcgccgaaaatatctacctcggagccggagcattcgtgggagtcggccgtccgccgttaaggtccccgttcgatgcaaccgggaccgggccggtccttgattcggaattcggaagctacccggatttcgttttcctttctttccgggtatatttttgagggaggcttgccgatgaaaaccagggcgcggacgaaaaccggaacgacggcggcgaagaaggcccgcaatccctatccgccgggcggccgcgaggacgccatccgccagttcatcctcgaacacagcgagcatcttttcgtcacccacggatacggcaagacctccatggacatggtcgcccgggagtgcggattgtccaagccgacgctttacaaatactttaagaacaagtacgagatgttcaccagcctgtatgagcggctctaccggagcctcaatgagatgttcaagctcatcctcggacggaaccgggacaaggcccaggtcctggaagagatcatcctcggttactttctcttgatgacctctaaaaaggactttttgaaaatgtacttccgcgaacagcatctggtcgtccacgagaacatcgaagaacacatgtcctggcacgtcgaaagccgcaaaaaaatggaggagatgctggcccaatgcctccaggggatcctccggccggacatcgccaagcgctacggctcggccatggtcgcctcgaccttgttcgacatcctggagggcatggtttcaaacctcatcctccacggcgagcaggacccggccaaggaaaaagcgttcatcctggaatttctccggtccggcgttctggcccggtccgcctgaggaccgcctcctcttccgcggcctcgcccctttccccgggattccgccgtctccggcttcagtccgtcgttcattccctcctctcctctgactcgtgaggggaaaggatcgatcgggagaagccaaggcgctcgtgaaatgaggaaccgcgccggggggcgccggccttaccgacccggccctgggcgaaacctaccagatcgaagcctgccgcgatgattatgggtcgcgcggcgggacgaaccaggtcgccgggacctcccgggccaagaatactgccaatcgcaagtcgtctttccacagaatctcatggaaaccgcccgccgcgcccaggccgcccccgcggaatccctgggacgcgaatggggccgtgatcccggcccccgccgttcggacgctccggcgcccggcgacttcgagatgccggccgcggccgtcaagaccggagccgtcaatcggttccatagaaatgaggatgaagatcctgttcggggacgaaccgggcggttggacggtaaatggcttggaccgttccgggggcaagttcccgatggagggggaccgtcaggacatgtgtcgggctcccttcggcctcgcgcttcaacttggcgtggctgccccggatcgaaacggccgaaaaaccgaactcccggaggatccgaaggatctgccgggccgatagacgcctaagcctggccctcgccggacgggttttcttcgtaggtcacggcgatcctaccggaagttgaaggtgtaggtatatttcaggagaagggtgcggcccacggaccggggcagcggcggcctttccctcaagcggtcggtgtttaatccgtcgttatagacgagatagaaatcgttcccttcccgggggttgtatcggatgcggatgttcgacgtcagcgtgtcggcttcgcttctgtactggatgaaagcggcggctgaaaagcgggtgctcagcataaccagaaggctcagccgtccgatatgggcgatgaacttctggtttctttcggggaacgccgcccggttgaatccgtagaagccgccgacttccaggccgctcgaaacgtcccagcgcggcgaaattcccgccgagacgagattcccgtcgtaaaacgagccggcctccagcgagccttccaagtaaaagctcgccgcggtcggcgtgttgaaggccagcttcgtcgtaaaaaagcggtatcggccggccgggatctcggcctcgtcggacagggaaaaggcctccgaaacgttctcgaagaagaaggccggccggaccatgacataaaagtcggattttgcggtgaactggtatcccggcccgacctcggaggactcgacggccccgtctttattccgcaggtagaggaatccgtcgaggaagacgctgtgacgcaggagccaggacttttcgcccgggagccagccgtagaggagacggtcgccgaaacggctgtagtcgctccggaattcgaatcccaggccgggctcatacccggcgcccgcccgggaaaaatccaggttataagccaggccctcgacggtccggcgctgccagttgacccggaccttggccgggtcgagcgaaaggaggcggtttctcttccccgcggcgaaggtctgagcccaattccacgacaggtaatcgtcgccgaagagcttgacgatgccgtccaagccgtaagccgtgttgaacgtcccgtccacgccgatccggcaggtggccatcgcccccacccaggaattcggattgaagacctgccgccggacgcgcaggacgccgaagttttgcgagggcagatcctcgacggcggcggtctgcatgtcgagaaggccgaggtcccacggaccgatccggccgatcaagcgggcccccccgtagatgcggacgagcttcccttcgtggaggccgatgcgccggctgtagaaaaggctgctttcgtcgccgtaattgaagtcgaagacgctcgccctctcctggaagaagagccttttctccgggaagaacagggaaaagcgcgtcaggttcacctgctggtcgtccgcttcgacctgggcgaaatccgtattcacggtgagatccaaggtcaggttgttcgtcagcccaagcttgacgtcgagtccggcttcgcggacgagcttggtcgtgccgacgtaggccgtttccgcctcgttgagcgcctcggtccggccggcgcctccgaggaggtagggagcggcataaaggggcttgcggctggacactccttcaaggacgatctcgcgcgtctgggagggtttaaagcttccccagaagccccatttcggcgggatggcgggaaaggtgatcacttcgtttttgcgggcgatatatcgccaggcggtgagccccatgacgacccgcccttcgacttcctggaaccggaggctggataacgggatccgcatttcgacgaaccacccctcctggttgcggacggttttcacatcccaaaacgtgttccagttctgattcacggggaagtccccgtcggcgtcatggaagatcgtcatgtccagccggaggccggcgggggtcgtgaaaaaggcgaggccgttttcccggtcgtggaacgtatccaggacgattcccagccagtcgttgctgagcttcatgtcgtcgcgttttttggatgtcgcctggatcttttccggctcgcggtcataaagccgcccggcgacatagagaaattcgtcgtcataggccacgaggatctctgtgagctcggagggctccgcccccgtgttcggcgtgtggaccaggacggggagcgcccggatgcctttccaggccggctcggagctcagcccgtcgagcgtcaccttgccctggatccgggggagtacatacggcgcggcgctttccgcctgcggattccccgccggcgccgggctttgccggccgggaagggccggcgacgcaaagaccaaggccaggagcgctccgaagagcctttgcattccccttcctcgtttaatgatattaataggccgcgattccggattgtcaagcgggttcggactgtccagccaagtcgatccgggctctagaggatatgctccggaacctcgacctgcgcaaagcggggcacgtggccaacgcctttctccggatggaataatatgatatcgccgcgctcattcgggccttcaagaccgatcaagggatctcaaggccgggcggagggccggctcagtcctcggcgcagcggacggtcgccggatacccgacgaacgccgctcggacctccatggggacccctttcaagaattccacgctttcccagacattgtcgatcagcttcgcgttgccttcatcggtgtagagcttgaaatcggccgagctccggacactgtcctcgatgtcgacgcagagccaattccgcgaacaggaaaagtcgaagcggtccatctccacccggcggaggttcttgttattgcgggtcttatagatgatcgtccttttccccaggtcgtaaacgatgctccattgggtattcgttcccgtcaccgcggccaggatcgcgaaggtccggtcgatcgctccttcgcttccgcccttgtccgcctcgaccatcgccgcggcccgtgcaaaccggccggaggattcccgggtggcatcgtcaaaggcctttggatccccggtctccccatgcgacgtgaagtccagggacacgtcataactgttgttggccaggacgggataaggcaggtccttcccggcgtgaacgactgtcttgccgcccacgtattccagcgtggccgcatcgccccaggcgtcggcgatgaggaaatggagcggggccagggatgtgtttgatatccggacgaggcgatcgctggccagcacatccgcgactgatgcggacatgtccagctgatactggatccattgcagctcccccagcccggagcggctgtccgactcggggtaggtcccgttgttgttccacatctgctcgatgaccagcccggcctcgttcatcccgccatagggaaactcccgtccgttctggttgaaggaaatgcttccgtacttggaaacccaagtcaacggcttctccgggggattggccagggacgtctttttcaggcctcgggggttgacctggatctgcccgaagcccgtcggaaaatcgaagttccggccgtaaaaaacgccgccgtccttggtcttcaggcaaaacgtcgtgcaagggcgggcggccgccggagcgagggcggtcgccagtatcaggacgatgagggaacgggctctggttctcatacagactccttatttgaaaccctctctcgtagacgaaaaacgcgggaggaaagttccttccccctccgggggctcttgtgttcgcccttccttggacggaagggtcgttctcgcggtttccggcacttcagacaagaggtgatgccgcccctaatcttcaccgtgtttattgacgattttgccgtccaccatgaccagcgagggctgcacaaccgcgtcgattttttcgagcggattttcttcgaccacgatcaggtccgccaatttgcccttctcgatggtcccaagcttgtcggccatcccgaggatttcggcccccgtgcgcgtggccgcgatgatcgtctccatcggggtgtaaccggcctccagaaagaaacgcagctccatgagataatatttcggcagttgcgtcgtatagtccatgatgacgtcggtgccgatgcccgtcttgatccccgcttttttcaagcgacgcagcaattccatgtttgccgcatggtcaaaataaaagcgcctcgactgggtgccccagtatcccccgcgttcctgaaaaatatgatagtaagccacgatcgtcggaaccgcgcaggtccccttctcggccatcaggcggatggtctcctcgtcgcgcgggagcggatggtcgatgccgtcgatgccggcctggaccgcccaggtgatgtagaaggtatgggaatccgcggtcacccgaaggcccatctgatgggcctcatcgatggccgcggccgcctcctcaagcgtatagtggctggccagcttgatgcaatccgcgccggccttgatttgctctcgaaccgcctttctgaaatcatcggcgccattggcttccctgacgatgccgttgacgatcaggtagccgccttcggctccatgtccccccgtgcccgtgatcagcttgccggcggggaatatccgcggcccggttacgaggccggaccgcaccgcctccttaagccgaaaagggacgtcgtcgcgggaaccgacgtcccgcaggctggtgattccatgattggagtaatacttgatcttatcgacggccctcagcgtcgccgtgatgtctgtgtccgtgaaaaactctagcacattcgtcgggtaggtgatgtgggtgtggaggtcgatcattcccggcaggatgtacttgccttccgcgggaatgagggccgctccctccgggatggtcacttgtccgagtcggccgacctcctggatgcggttcccccggatgacgatgacggcgttgctgatcggatttgcgccggtcccgtcaatgagagtcgctccccgaagaacctggaccgcggccttggacaggtccggttcgggcatggggatgcgtcggggatcgtccgaaacgttctgcccgggacgctgtccgaggctgtacggctttttctgcccgtaaacaaaccccaagacaatgagaaagacggcgacgaaaacggcgattcttctcttcatgtttttctcctcccgcgcgatttcagctttctcccggccgcgctggccggccccatcatgataggaattcgtttcttatcctcggggctgaggatatttttactcccgcggcctgtcaaggctgattgaggacggcccgcgtcgtctcagaatcttatcgtaactccgtattcttataaaggccgccaagagaggaggcgctcggccacggccagggctcggcagtcctttgaccataagcatcgtcaaagccacccgggccgatagctctgcccatcgtaaatcgtttatccacggaatctcatggaaaccgcccgccgcgcccaggccgcccccgtggaatccctgggacgcgaatggggccgtgatcccggcccccgccgttcggacgctccggcccccggcgacttcgagatgccggccgcggccgtcaagaccggagccatcaatcggttccattgaaatgaggatgaagatcctgttcggggacgagccgggcggttggacggtagatggcttggaccgttccgggggcaagttcccgatggagggggaccgtcaggacatgtgtcgggcccccttcgacctcgcggcaatccaggcggccggttcaagcgttccccgggactgacggttgaataaggccgcggtcgcacccgcggacgatgtataatacgaggaaaatgataaggagcgcgtgatgaaatcttgcaatgggaataggattttactctgtttcggagcgatgtgcctgcttgccgcttcttccccggtttgggcggaggagatgcaaaaggcgccgaccacggccgaggtgctggccgcggcgaaggccgaggactggcggccgctcgatccggagaacgccctttatctcgagctggacggcggaagggtggtcatcgagctggccccgctcttcgccccggagcacgcggccaacgtcaaagccctggcccgggaaaagtacttcgacggtttgtcgatcgtccgcgtccaggacaactacgtggtgcagtggggcgaccccaacgccgataatccggagaaggcacgcaagatcctgcgcgctcgggcgaccctgcccgccgagttcgaccgcccctggagcgacgggatttcctttgccccgcttcccgacggggacgtctatgcgccggaagtcggattcgtgaacggcttccccgccgcccgggacgcgcagagcggccgcctgtggctcgtccactgctacggcatggtcggagccggccgcggcgacgccgccgacagcggcggaggcgccgaggactacgttgtgatcggccacgcccctcgccacctggaccgaaattgcaccctgttcggccgcgtcgtcctagggatggagcttctctcctcgctgccgcgcgcctctggggagatgggcttcatcgaaaaacccgaacaattcattccgctccgctccctccgcgtcgcggccgacatgccgccggccgagcgaacgaatctggagatcctgcgcaccgacaccgataccttccgcaagctggtcgagtcgcgccgcagccgcaacgagccgtggtttctgttcaagcccggccgcgtcgagctctgcaacgtgccggtccccgttcggacgaaaaccaactgaatcccgggaaagaccggcgcccctggcggcgatacttcgccgtcctgcgcgaccccagggagccggggcggcgccgctccttctctctactgtccgcttcttttccttgacattcatgaaacgggggccttatcattaaactatattggttgtataaccaattagattggtgatctaaattgctggaagcgctgctggaatcgcccgtgaaggagaagcttctcctctatctgctggtcaatgagggctcttatcccaacgagatcgcgcgcaatttttcctttaacctgaatgccgtccagtaccagctgaaaaagctggaggaagccggcgttctctacagccgattgcggggcagggtgcgtctgtacgggctcgacccgcgatatcccttccgcaaggaattgcaggcattgctgcaaaaagcctttgatttcctttccgatgccgagaaggacaaatcctttgttcgccgccgccggccgcgcttgccaggaaaaccgctgtgagagacctttcccgtttttcccaccgggaactggcggcgttcatttgccagcacctgcgcggccgtggagtcgacgcggtgctgaccggaggcgcctgcgtgacgatctatacccgcaatcgttataagtccacggacctggacttcgtcaatgtttccggcgcttcggtgaacgtgattgacgccgccttggctgatatcggcttcctgcccgaaggaaggatctatgtcaacagcaaggtccggtattccgtcgacattttaaatccacccctttcgatcggcgaaaacaagatctctgagacgaacaccatcaccgtaaagaaaatggcgctcaggctgctgatcccgaccgactcggtccgcgaccgcttggcggcatattatttctggaacgacctgcaggcgttgaagcaagccttgatggtcgccgggagcaacccgatcgacctggaggctgtcgaaaaatggtcgaaaaaggaaggcgcgcgggagaagttcaggatgttccgggaaaaattggaaaagaataagttatagaagccggcctctttaccagttaaacacgtgcttgccctggcaacaacccttggacgtcctccgcgacccttaagagcgaggaataggatcgggcggttagcaccggtaagctcaacacatttccgcgcttccacatccggtctatcaagccggtgatccgcctgcgccgactcgagcggaaccgccggacggcgggcggtgagcgattccagtcgcgtgattgcaggatggggaggagcgtttgggtccgggaggaaggtccgccgtcgtacaacgcccaggccgctaacgccggttcatccctccgcccgatcatccccggcgctgccatcgcccggtcttcaacataaagcccatctcagaaggattgaagcctcttggctaaaccggccgtgttcactttgcctttacagcgcgattcggcccggttcagaccttgacaacgcggtttattagtactatatagtattattcgacatagaacctagaaaggagcctgttcatgttgaccgccctgctgcttctgacgatccttccggctttcgcgatgatcggagcggctcaaacggcgaatccggccgacgatccgacggccgaaatcatcgccctggaaaaagccatgctcgaccgatggggaaccggcgatacgtacagtttcatcgaattggccgccccggaaatcacttatttcgacccgagcttggaaaaacgcctgaacggacgcgaagcgtttgaaaggtttctcgccccgctcaagggcacgtttcgggttccgcgttatgaaatcatcgatccaaaagtccaggtttacggcgaggcggccgtcctctcctacaacatggtcgattacgatgaaaagggtatcaacgccttccgcatgaatgtcacggaggtctacgttcgccgtgacggccgatggggactcgtccattcccacttttcgatcaccaaaccccgaatcaagtgacccccggaaaatgatgagcgaacacaagataaaaaaagcctgcctggatctgatcgcctcctgccctgacgtcgtcctgacaacgatcggcgccgacggcttcccccaggcccgggtcatgttcaacctgcgcggtccgcgctattccgagcttcaggagtacctgcgccccttcgatgggacgttccggtattacctggacaccaatacgtcctcctcgaaaatccgtgacgtccgctcccggccgcaggcgtcgctgtttttctgccggccggagattttcttcagcctgatgctcgccggcgatttgacggttgatgaagatccggtccttcgccgggagctctggcgtccaggttgggaaacctattacccggccggacccgaggatcccgactatacggttcttcgctttgattctcgttacggccggggttggaacggcagcgtgaattactttttcgacttgagcgggaaacgttgaacaagctgcgtcagggcggtttcctgatggccaggatccatcaagtctccggccgcgtctttgccggccggctgcgcggcgccggcatcgaaatcaatcccgcccagggccggatcctgttcgccctctggcagcaggacggcatcccgattcaaacgctcaaggaacgaacgtccctcgagaaatccaccctgaccagcatgctcgatcgactcgaagaggccggcttcgtccgtcgccggccttctcttcgggaccggcgtcagattttgatcgagcggacggataaagacctcgccctggagcgcgcctatacggccgtctcccgggagatgaccgatttatactatcgcggatttggagacgaggaaatcgagcgcttcgaatcttatcttcgccgcatattcgaaaacctcgaccgggcggagaaagaggaaaaagcttgaaatgcctccttgggataatcggcgggttttaacccaagcaaaaaggccgcgcttttaggggccgcatagccattcccggacagggcttcgacctgtcccggccgtacttaaacgcctatccaaaggcacccctggcagcgacgcctcgtcgccctacatgagccttgcgggctttgcggtcctacgcgaggccgccgagctagggcaaatcggagccatcggcaccggagggcttagcttccgtgttcggaacgggaacgggcgtttcctctctgtcatggttgcgtgccgggcgcggtgatctccgtcaacgtcgacttcccttacgccgggctgatcgacagggggacgcgcgccggcctggtggagaacgacgtggtgttgaacaccgacgccgaggcggggatccgccgccaggaactactgcggctgcgtcttttccaaggcggagaagctactgcgcctgaggcgctgaccggaaccggccggggatcggctcagctgccgcggccggcgtccttctccctgccggatgacgacaggtaatgcatatatttgtcgctgatgagcttcaggtagcagaggaacccgaaacccagggcgaagcagtgatagccgacggtcttcatctccaccaaaacggtttccttcagccccgggcgcagcaggtcgacgttcatgagatacacgcccatgaagaaggtgaaccccgccgccgacaggagcagcgcgatcgtgattctcatgcccttcgggttggcgaactccttacgctcccgccgggagagccgctggatgtcgctgaagcccaggaatcccaggaaaagccccatgaggaagacggccaggccggtattggccagggcgtagcggttgggatcgcggaacacctggatcatcaggtagaccgaccagacaaagaagacccagcgagcatggctcaagacgtggaagatcctaatcgttttcatcgcgcctccaatcgaacggccattctacgcccggtgccggcgcgaaacaagctcctgcagagcggccggaaggaccgcggaaacgacgctgggcgccggatttccggctcccggcggtttggaatgagggaggctctggggtacaccgtttacctcgataaacaagaaagcggtgctggccggcaaggcggccgcgatcgccgccggcaacatggtggtgctggtcgtttcagggtacaccggaagccgatggacccttcggggtgcggctggaggagagtaaaatttgacgggtaaaatggtaaaaaaaaaaggccggactttcgtccggccgattcttggtgaaaataaaaaaacccggcaacttcctactctcccaccaggcacccctggcagtacaagcgtttcgcagtcctacgcgacgtttcggagctagggccatcggcggccgatggtcgctgccaggggaagccggatgcttttcggataaaaaaaaggccggactttcgtccggccgattcttggtgaaaataaaaaaaacccggcaacttcctactctcccaccaggcacccctggcagtaccatcggcaccggagggcttagcttccgtgttcggaatgggaacgggcgtttcccctctgttatggttgccgggatttaagttactaaatcccaatcgaacttatgaatgcgacattttttgcctgaataaactttatggtcaagtctcacgggcggttagtaccggtaagctcaacgcatttctgcgcttccacgcccggcctatcaaacaggtgatctgcctgtgcccttcagcccttgcgggagggagatctaatcttgaggcgtgcttcccgcttatatgccttcagcggttatcacttccgaacgtagctacccagcgatgcccctggcgggacaactggcacactagaggttcgttcgtcctgctctggatggaataggttgtcaaatattcatctacgatttgactctcaagggcttgggataaatattttcccgatcttcaatcccctgctcgtccttgttttgcctcgttcattttggacgatcccttgtaaatatttccgtcttcaacgatacggcccgccctttcttcattgaaccaattgctacccttgaaaactgttccgttctcctcgatatgcccgattttcacttcgttgaaaaaattggttcctttatatattgagccattctcgtcaatccgtcctattctttcttcattgagccaactcgcccctttatagatgattccatcatcatcgattctccccttcatctcctcattgaaccagcttgttccttgataaattttctttccccggatgccaaccgaagacataatattttctttatcttcttgcaccgtacgatttgtatagcggggcaatgaatcatcgggaggttccgattcgcttcccgtcaggattttgaacaatataatgaggacccctatcattatggcgatcgccgcgatgacaatgaaggcgacatataaaaggtaaatccagagagcaagaaaatatagagaaagggcgatcctgattccattcttgagcccgcgatgagacaaggaatccgtccaatcgcataatttcacgatcaccgttagaaaaggccggatcacgaagcgtgaaaataatccttgtttttcagcgcttttatccttcttttttcgaaaccaggattcgaccttctccgtaattatgttaatggattctttgttgagcaggaaaacgaggatcccggcaaggaggggaaaaaatatgagaacgatttcaaaccatttcaaaccaggcatagtattcatcctgctcccccttttatctgtatgggctcggtatcatctattggttttcttttgggtcgttcttttcttccgaagacgaagctccgttcaaagcgccaattaaagccgctaataatcccaagatcgttccgatccctcctgcctggatgctcaagcccatctcgcgcgcttcgcctttagcgaagggaacgatgattttccagaggagaagcaagaggccgccgatcgaggcgacggcagccagcagtttcgcctgctgccttttcaagaagaaggcgataataataagaactccggctgccggaatcagccaaaagatgggttctccaacatcttcatcggtagtcaattgaaggcccgtgatctccacctcacaggcccgaatccatggcaaaaagaaacaaatcaggatgatcaagccgccgatgggaaacagaattttgcggtccattagatctccctaaaagtgaatgattttcccttcatatttgggaatcatttcctcaaacagatttttaacaattgcgagctatgaaaatgacttcaccgatttaaaaaatgaatccgaaggcgatatcaaacgaactgaaagaatcaccctcgtgaccgaccaggcgaattctgggattgagataaaacgagttcatgcgaaatccaaagacaaaatccgtggcaaatccggtatacgtatcggagatgctgtagtcatgatagctccacccgaggacatcgatcgccaatccaatactcagaccgccaaaaatgatcatatttcggcttatgggatatcgatattggatccccaccatcggttgaattcttgccatcgtccaatcttcttttcctgggaaataatagctgcttaagccggccgttaaataaatgcggcttaaaagacgataataagcattgaaatcgatcccgaagccgacgggtaataattcgttgacgtcgctcataatgaacgataaacccgcgccgaggccgaaaaacaggttcttttcgacttcctcatcttcaccgactgtttcggaaggcgaacgtccgggccgataaacctgccgttccgggttttccctgatcctttccgaagggacttcctcagccgcttccctgatgtcttcatattgttccgcgatgattgctttttcgaatagttcgcagaccatattgctcatatagccggtctggctttcattcaacacgatttcataccaatcgccttcaattccgatcactcgatattccgttccaaccgaagccttattgataaccgctccactcatggatggcgcattacgaacatttgccgtcgctactttcacacggataaaattgacattgatctctttaccggattttttcagaggcttgttcccaacttccccacgcggaggagaaatcgtttcggttggtctactgacttcagccgcaggaggggcaaccgatccaccctcggcgagcactttaatttcgtcgccgatggaatagaaacctttcacggatttatccgataacgtcatctcttgatattcgaccttcaatcgactgtctttttttactctcgctttagggaatatcgataaagtacacttattcccgactccgacaatattcgtcgagagcatgatttcgatatcctttttaccgaataaagacagtaaaagagacgtaccgaaagattcttcggccttgatgtaatccgtcgtgatcaatccgactcgttcatttgtcgtaagcaaggcaaagcctttttcaattaaaacttggctcgcagcatcaaagatgtccatttttgatgcgtaaatttcgattttgattcctttaacctcggcttggggaaaagcaaatgatgccaacaaaaaaagaaccagggcgaaacaaacataggttttaagacgcatttcaactctcctttccgattttccccgtttgctgtccttgattatctctccggctggataaagccccacgatccggttcccactgataaagagcccaaagtcgactattttttcccgttattacgacaaattattgaaatcacccgcccagcccattaatacgctttcccgctaatccctttaattacttaatgatagctaatttcgtctctgttggttccttaatcctctattctttatttgcaaagaaccgtcttatttcctatcatggtcgggccttttccctggaaacgagatggcagacagatcggcaatctggacggagaagcttatcgccgaaatcgataaggtcgtccatatcgtcatcgcccgcagattcatggatagaaatttccttttatcaaaagccccaacgacattccctgtctcgtcatgaaaccccatcattcccttcgaaatgaggataattgagatcaaaggaagatcctgaagttcgcttgccggcggcggccgctcggccgtaaacgatatcttgagatgatcaataatccggtctatcacggacgcccgcgtcaagaaggccatgaccgtcatccgacccccgcacttaggacatttcagcggatcgacctcatacaccttacgaatcaggacggcccagccttttgaggaaaacgaccgatttccctctcgcagcactcgaataatcgacgagccgcctttctttgcccttccccggtacgcattggcatataggccgtaatacctgaccatgacctgacctttattcggaatatgggacgtcacccgggcgatgaactccagataatccatcgactcccgctccccgtccttaccgccaatacggtaacccacccggccctccggctcgataaactcgagtcgttccaaggagacgaccggccggatcatgtacttccccacacgttccgcttcggccttggtttcggtccgcaccaagctgtgcacattgaatccggaatgcctccaagagagaaggcgttcagcccactccgggctcagcaatcccttggccacaagaatcgccagaacttcccgggcaaagagccccgacaaccgggcgtcatcgatccgggcgatttcgtggaaaactcccgccgcgtccaggccgccgcatgtcactaaaaaatggagatgcgggtgaaaattgatgcgatccccgaacgtctgaatgaccgcgatgacgccgggaatcaggggttccccggccgccgcctcaaaataaagcttcaaggcccgcaacgccgcaagggatagatcgcccaacagccgcctcttgaacttgaagaagatccgcagcatcttgggaatcgtgaagacgacctggcgatgcgggacatcccaaagcagccgttccctcacccattcgccccacatttcgacccgcttcgcctggcacgacgggcagaatcccctcgttttacaggaaaacgttaacagatattcttcccggcaggcaggacaacgaattcgggcgaagccgcagcggggattcccgcagtccagatacttttcaacgacctccttgaccaccggccggaaatatccatattcccgctcaaagcggctttcatactcagccaggaatctctcgaaatgatgggacaataccctgtggagcaccgaccgctccggatgccgaggacgatagactcccgccatggtgggagaaaagactcaagattcgggccaagatcagccggaaaaccggatctccccagaaaatatggctttttgccaagcccgggcgccgaaatcaagtcggaaaacatcaaccgcagttgacggggagcgaccgtcccggaaatggctgccaaaaaaaaaaaagccacgcgtcagcgtggcttaatttttgagaaataaaaacccggcaacttcctactctcccaccaggcacccctggcagtaccatcggcaccggagggcttagcttccgtgttcggaatgggaacgggcgtttcccctctgttatggttgccgggatttaagttactaaatcccaatcgaacttatgaatgcgacattttttgcctgaataaactttatggtcaagtctcacgggcggttagtaccggtaagctcaacgcatttctgcgcttccacgcccggcctatcaaacaggtgatctgcctgtgcccttcagcccttgcgggagggagatctaatcttgaggcgtgcttcccgcttatatgccttcagcggttatcacttccgaacgtagctacccagcgatgcccctggcgggacaactggcacactagaggttcgttcgtcctggtcctttcgtactagggaccacccccctcaaatctcctacgcctgccgtggatagggaccgaactgtctcgcgacgttctgaacccagctcacgtacctctttaaccggcgaacagccggacccttgggacccgcttcagccccaggatgagatgagccgacatcgaggtgccaaacagtctcgtcgatatgagctcttggagactattagcctgttatccccggcgtaccttttatccgttgagcgatggcccttccatgcgggaccaccggatcactaagcccgagtttcctccctgcttgagatgtctctctcgcagtcaagctcccttatgcctttgcactctacggctgatttccaaacagcctgagggaaccttagggcgcctccgttacattttaggaggcaaccgccccagttaaactacccacctaacactgtcttcctccccgatcaggggagcgagttagaatcccagaatcgcaagagtggtatctcaccgatgactccaccggacccgggggcccagcttcaaagtctcccacctatgctgcgcgtgcgatcccagaatccaatgctaggatgcagttaaggtgccggggtctttccgtccagcggcaggtatccggcgtcttcaccggaaccacaatttcgccgtacccctctcagagacagcgctctagtcgttacgcctttcgtgcgggtcggaacttacccgacaaggaatttcgctaccttaggaccgttatagttacggccgccgtttactggggcttcggttcaaagcttcgcttgcgctgacctctccccttaaccttccagcaccgggcaggcgtcagaccctatacgtcgtttttatgactttgcagagtcctgtgtttttgctaaacagtcgccagagccatttttttgcaacctcctcgggctcgcgggcgcaggcccgttcaccctaccgaggcacctcttcttccgaagttacgaggttagattgccgagttcctatgagagggctcatacgtgcgcctgaggattctctccccatctacctgtgtcggtttacggtacggacacccgggaaacttcctagaggattttctcggcagtttggggttaataagttggtagggccgaaaccccacttcctcgccacactcgaggttaacgaggctccggatttgcctggaacctccctctactaggcgaccgcacacttccaaacgtgcgtatatctaccctcctgcgtctccccatcggtggtaacgcttctcaggtggtgcaggaatgttgacctgctgtccatcggctacgccattcggcctggccttaggatccgactaaccctgggcggactgaccttccccaggaaaccttagattttcggcgcggctggtttctacagccgttatcgctactcatgccggcagggtctcttctgaaaagtccaccgcgcctcgcggcgcggcttcggcctcgtcagaatgctctcctaccactcatcctgcccgaaggcaggacgaatccgcagcttcggtgacatgcttaagccccgttacattgtcggcgcaagaacgcttgaccagtgagctgttacgctttctttaaaggatggctgcttctaagccaacctcctggttgtcttcgtatcctcacatccttgcccactgagcatgtactcagggaccttagctgacggtctgggctgtttcccttttgaccacggagcttagcccccgtagtctgactcccgggcagtggttatgggaattcggagtttggttggagttggaagaactttcgaacccctaggccatccagtgctctacctcccatgccattcacccgaggctagccctaaagctatttcggagagaacgagctatccgtgggtttgattagcctttcacccctaccctcagctcatccgagctgttttcaaccaacaccggttcggtcctccctctggtgttacccagagttcaacctggccaagggtagatcacccaccttcgcgtccatttcacgcgactgaatcgccctattcagactcgctttcgctgcggctccccgtctgtgacggttaaccttgccgcgtaaaatgactagccggctcattaagcaaaaggcacgctgtcaccccggttgcccggggctccaactgcttgtaagcatacggtttcaggtacttttcactcccctaacaggggttcttttcacctttccctcacggtactagttcactatcggtcgcagacgagtgtttagccttaggggatggtccccctgaattcccacagggtttcacgtgccccgtggtacttgggaactccaccggagagaccggacctttcgcctacaggactatcaccttctctggtcgctctttccagagcgctcggctagatcggtcttttgtaactccgtggcttcatcgagctgaagcccgtggagcccctcgaccccgcatccacaacgcgctcgagcttacatggacacggtttgggctgttccccgttcgctcgccactactaagggaatcacggttgttttcttttcctccgggtactgagatggttcacttccccgggttcgcttcccggccctatggattcagaccgggataactagggtttgcctagttgggtttccccattcggaaatctccgggtcaaagcctgttgaacggctcaccggagcttttcgcagctggccacgtccttcgtcgcctgcctgcgccaaggcatcccccgtatgctcttaataacttgaccataaagtttagtcaagacaaaaaatgccgcttgttcgattgtcaaagaaccgttcgcacatctatccaagacccccgacccgggggcgatggcccttataaaaaaaatttttttcaatggagctgaccgggctcgaaccggcgacctccggcgtgcaaaaccggcgctcttcccattgagctacagccccggccgaaacgttcccgctcggttccgttttccgcggagggattggtgggcctaagtggatttgaaccaccgacctcacgcttatcaggcgtgcgctcttaccaactgagctataggcccagcgcagcgtcattcggcccacgccgaccccggcggaaataaaataaaaaaaagcggagcgaaggatttcgcgcaatttgctcctttgaaaggaggtgatccagccgcacgttcccgtacggctaccttgttacgacttcaccccaatcaccgaccataccttcggcacctgcctccttgcggttggctcagcgacttcgggtacaaccagctttcgtgatgtgacgggcggtgtgtacaaggcccgagaacgtattcaccgcggcgtagctgatccgcgattactagcgattccgacttcatgcaggcgaattgcagcctgcaatccgaactgagaacggttttaagggttggcttgacctcgcggtctcgcgtccttctgtaccgcccattgtagcacgtgtgtagccctggacataaaggccatgctgacttgacgtcatccccaccttcctcctcgttatccgaggcagtctccttagagtgcccgacatgactcgctggcaactaaagacaagggttgcgctcgttgcgggacttaacccaacatctcacgacacgagctgacgacagccatgcagcacctctatcggcttcccggttgcccgggatcgtcgccctttcgggtccctataccgacagttcaagcccaggtaaggttcttcgcgttgcgtcgaattaaaccacatgctccaccgcttgtgcgggcccccgtcaattcctttgagtttcaatcttgcgaccgtactccccaggcgggatacttaacgcgttggcttcgacactcccacatgagtgcaggaatatccagtatccatagttgatggctaggactaccggggtatctaatcccgtttgctcccctagctttcgtgcctcagcgtcaggagtagtctagagaaccgctttcgcctcaggtgttcctcccgatatctacgcatttcaccgctccaccgggaattccgttctcttcggttatcctcaagccgagtagtttcaaggaccgttccgcagttgagccacgggatttcatccttgactttcccagccgcctacgcaccctttacgcccagtaattccgagtaacgtttgccccctacgtattaccgcggctgctggcacgtagttagccggggcttcctctgaggttaccgtcaaacccttgcgggcattcttcacctctgacaggagtttacgacccgaaggccttcatcctccacgcggcgtcgctgcgtcagggtttcccccattgcgcaaaattcctcactgctgcctcccgtaggagtctgggccgtgtctcagtcccagtgtggccgttcaccctctcaggccggctacccatctgagccttggtaggccgttaccccaccaactagctaataggacgcaggctcatcttcaagcgccttgcggctttgattacgggacttgtgtcccggaatgtcatgcggtattagactccctttcgagagcttattccccacttaaaggaagattacccacgtgatactcacccgttcgccactcatcctaaagttgcccttaggacgcgttcgacttgcatgtgttaggcacgccgccaacgttaactctgagccaggatcaaactctccagttataagcactcttgcgagcacttagcgagtttgatgatggcaaattggctcgatcacaatcgctccgctttttaattcaaagatccgtttctctctgcccgagagagaaaagccccggcccgaaacattccgctacttgtttcagcctttcggctgtcagataggaaagccaggtcaaaggctcggataatatagggctttccgaagagtttgtcaagcaaaaaaaatatttttccccgcactttttttaattgacgaaaatctaaatagttacagacattttttcgttaacggagaagcgttgttttttgcattttttcgttcgagcgaacagcgcggaaattgtttttgcacggttcttgcatagacggccgatttgcctgatccgatcaactccgacatctgttttttcccgccggcacgggggaaaggggagcctccgggccgcggtcgtcaaaccgcgttgacggcccggcggatccttccacggcaaaccggaaatcacggttgacggcggccggcccgcgctcctcttcccccgcctggatcgattgttccggccggttggcacgccgcccgcattctccgccgtcgccatgaacaaacccatctttctcgccgacgccgacggcctccgccgcctcgagattccggccgtccgaacggaggaaaaaggattcagcctgatcgaagtcttgttcgccgccgggctcatttcctttctcctcgccggaaccgccgagcttctcctgacctccatcgaggtcgaccggaaagccggacggaaggtcaacctcacggggctcctttcctccgagctcgacgaattcaaggccaagccgttcgactcccccgatcttgcccccggcgggggcgagatcgtcctccggccggagacggacgggccgggcgtcatcgtcgcctggacggtcgaggccgtctccgcgaacctgaaaaaagtgagcttcaccctgacccgggaaggacggacggaccagccgctggaagccgtcctgctgatcacgccggagttggccggacgatgagaaagagggcggaggaccgcagcccgggtttttccctgttggaagccctccttagcctgaccatcttcttcttgatcttcgccgggagcctggaattcttcgggaccgcccgccgcgtgtttttccggcttctgtcccggcaggaaaaccatcaggccgcatgggccgccctggaccggatccggtcggacgtcctgctcgccggccgggggctcgtccgcccgatgcgcttggggatcgtggccccggccgaagaggccggcggccgatgggtccttgtccgggcgggggcggccccggttctcacggccggaccgcgggccggcgaaacaaccgtcgccgtggccggagccaacccggactgggcgggaaaaacactctgcctctacgaccggaccaggggggaaaaagcggttatcctggaggccgtcggcggaatcctgacgctgtcctctcccttggattgcgattaccggatcccggaagcctccgcggccgtcctccagacgacgtccctcttcttggacgcggggcaaggagtcctccgccgtaaatccgattcctcgtccgcccagccgcttctggaggacgtccattcgttcacgtttatctatgactctgaaacctgcctggccgaggcgcgcctttctctcgcctccgccccggaggaattccatgccctcaaaatcctggcccgaaacgccctgctcggaaaaatgcgctgacggccggatcaccggacggaccggctcgatcacgatgggcgtggtcttcgcgtccttcctgatttcaaccctcggcctcggcttatgcctgttgacctggacgtaccgccaatggagcgcgtataaaagcgacgccgttctgattcgggaagcggccgaaaacggcgcccgggccggacaggccgccttggacgagatcctcgccggccggccgtttcccctcatcctggctgaaggggaatatgaagccctccgggccgccaccttggccggggaaacggacgccgtggccgctgccctgggaacgggcttgccgctgaccgccgcggaaacggccggaggatgggagtggtcgtcggaaacggagttccggtcggttcgggtggccgattccgaatcctttttcggagccgccttcgccgcgacgatcgaagcccgggggcggctgagccgccggcctcaaaacaaaaggaccgccttggatctcggcttatccctcatggccggccgcgttcctttatcttctttcccctttctgctggccggcgaaaacggaccggaaaacgcggccgcgcttctggccgaagggcgcgtcgttctcgcccccccggaatcgggaagcgcctccccgctcccggcggcggccggccttcccttgattccgaccgatccggaacctctcgtggccgaggcgttgagaatcaagatcttctcccccgacaagctgaccgtcctccagctccgacgggcgctgggcctgccgctcgtcgatgaaccggtccccgacggcgtgtatctcgcggtcagcgaggccgtccccggcggcatcttcatccaaggcgacgtggacgaaatgatcctggccgccggcgacggccgccagcatctccaagtccgcctcgaggaggggctatggcggatgatcttcagcccggccgaggacgtcctggaaatgaccggaccggacggaattccaagcctcggccgggccccgcttccggtcgtcctgatcaacgggagcgtcgcctcgctcggaggaggactcatcgagacggacggaactctgtctctgacggacagccccgacgcgccctccctcttggccggattgtccctgacgctcgtttccgcgggggaaatcgtcatctccactcatttaatccaagacggcgtccggtggaaggacgggattccttatctcaaggacgcgagcacccagttgttcatctacgcgagcggccgggatctcgtcaccggcgcccgggcggacggccggatccgcgtcgccgccgaagcgccggccggcttgcatctccaggcgtccctcaccgcccgcgacggcgtccgtctcgagggaacccgccacgaggtcaccgtctccggaggcctccaagcctccggcctggaaacggccggcgccctcctgacgatccggccggacgaccggttgacgtcggacctcgccgacggagccggatccccccgggccgccgtcccggtcctttttatcagcggccgggaaatcctccaatggaccgaccgatgaccggccgaggattcaccttgatcgaagcggtcctcgccctggcgatcctcgcggtcatcatcaccgcggcctcgctgtcgtttctcaacctcgcggcgaaataccgcctggagaaagcggtcggagaagtccggacggccctcgtttcggcccgggccaaatccatcctgaacggacgccgattcagggtccggttcggggcggatttctacaggatcgaaacctacgatgaaaattccggcctttggcttcccgacgcctcggccggaatcgaaggagcggccgtgacggccaacaatgctcccgtgttcaccccggagggcggcgtgacgaacatggcgacgatcaagatattcaacggctggggcgcgtacaaaatgaccctggccatcaccgggcggataaaaatcgcgcgccttccctcctgagcgccaggacctctcgagccgtccccttcatccgcggaatccgttcactccgccgccagatcaccccgggcgagcgtatcgagaccgctttcccccggccccgtcgccccaagaagctaaactcatgaaaaaagcggaagttttcatgccgccttgacacaaatccattctcccgattgaatatttcggggcatctgcgatataaagaatggttattaatgaaatttatttatggaggcttcccttgacaaagccccttcctcttttcatttccattttgaccctggcggcggccgcgtccgttccgtttctcgccgcccaggaaccctacaagacgccgccgaaggaaatcgtcgacattttgagcgcgccgcccacgccgcgcgttctgctgagtcccggaggcgaccgtctgctgctgatcgaaagcgaaagcatgccgtcgatcgcaaccctggcccgtccctttctccggctggccgggatgcgcttgacaccggctgacaacagccggcagatgacggttttcgacacggccttgactctgaagacgatcaaggacgggaaagaccaaggcatcgagctgccggcgggaatcaagctcgcccgcccggctttttccagcgacggccgttggatctccttcgcccgcttcctggagaacggcgtcgagctctgggtcgccgagacggccacaggcaaggccagggcgctcacccccccgcgtctcaacctggtgctgagcgggatcgcctggatgcctggaaaccggaaaatcctcgtccagatgattcccggcgaccggggaccggcgcccgtcgagccccgcgttcccgtcggcccgaccatccaggaatccggcgggcggcaagtgaaagtcgccacctaccaggatctgctgaaaaacccttttgatgaagagcttttcgaatactacgcgacgggccaaatctcgctcgttgacgcggtttcggggcggatcgagcccctcggcgcgcccggcgtgtttctctcgatcacgccgtcgcccgacgggcgctatcttttcgtcgaccgcctcaagcgtcccttttccaccagcgtcccgtattacgacttcgcccattcggccgaaatctgggatctttcgggaaacgccgtgaaggtcttccccgatcttccctcaggagaaaacacgcccatgaacggcgtcccgacggggccgcgggagttctcctggcaggctcgaaaaccggcgacggttctgtgggttgaggcgctcgacggcggggatccagaacaagcggcggagttccgggataaaatcatggccctggacgcgccgttttccggagagccgcgcgaggtcttgaagaccggaaaacgatacgaaggcttggcgtatttcgaaacgccggggcgggccctggcctatgaagtcgagtcgaaagcgtaccggcgggtgatccgtctggtcgatctcgatcatcccgagacggccccccgcgtcctcttcgatctcgacgtccaggacgcttatgccaatcccggcgatccggtcatgacctggaaagacggcgaacgcgtcattctccaggacaagaacgggatctatttctcgggcaggggcgcatccccccggggcgaccatccgttcctcgaccttcgggacatcaagacgggcgcgaaacggcggctctttcaatgcgccgacggcaaataccaggcgttcatcgggttttcgggacaggagcgccgggatatcgtcatcacccaggaatcccggaccgaggttccgaattatcatctgtattccctgaaaaccgggaaaacgcggccgctgacagctttcgctgaccccgccccccggatgacgggcgtgaagaaacagctgatcaaatacaaccggagcgacggaatcgagctctcgggaaccctctacctgccggcggattaccaagaaggaacgcggctgcccgtcgtcatctgggcctatccgctggaatacggcagctcggccacggccggacaagtccgcggctcgaccgaccgcttcaccttctaccgaggcgcgtcccagctgtttttcgtcagccagggctacgccgtcctggacaacgccaccatgcccgtcatcggcgattccaagacggtcaacgacacgttcgtcgaccagatcgtcggcaacgccaaggcggccatcgatgccttggatcgcctgggcgtcggcgatccccggagagtcggcgtcggcggacacagctacggcgctttcatgacggccaacctcctggcccatagcgacctgttcgccgccggaatcgcccgaagcggcgcttataaccggaccctgacgccgttcggattccaaagcgaacggcggtcctactgggaagccccggagacttatctcaagatgtcgccgttcatgtgcgccgacaagatcaagacgccgctgctgctgattcacgggatgaacgacaacaactccgggacgtttttcatccaatccgagcgcctcttcgccgccctgaagggcttcggagcgacggcccgcttcgtctccctgccgggcgaaagccacggctacctggcccgggaatcggtgttcaccgtcctggctgaaatgatcgaatggttcgatgcctacgttaaaaaccggaagtaagcgccgccgcgtttccctgatgaaccgaaaggatacacagacatgacgatccgatcgaaatcgtttcttcgcctgcccccccttcttcttatcgccgggctgttcctcctcgctctcccgccgcgctcgctgcaggccgcaaccgccgcggaggagccgacgtctgaaaagccggttcccgcctggctgcggctcggtcccttcgcttgccccccgccggctttcgccgatgatccggcgtttggattcggcccggccgagctcctggaattcgaggagctcgagatcggcggcgtccggcccgccgcgggacggggattgcgctggtcggacgggacgtcggccgcgtggacagaggtcccctgcggcgaagccggcctccccctcgaggccgcgggccccggaccgaagaccgcctacctggcggcctacgtcgaagcgttccgtttccaaaaggcccgtctcacggtgaggacgggacagcttcatcgggtctttttcgacgggcggcaggtcgcttcccaagtcaaggccgacgtcgacggccggacgacggccgatctgaagctcgagacgggcgtccacctgattctcatcaagaccgtctatgatccgaattccccaaccggctggaacgtccgcgcctccctggaattcgccgggagtccggccgggccggagccgcaaatgaccgtctcgccgggggagaaagtcgccctccggcacatactggacggcccgcgggcggccggcgtctcgctctctcccgacggaaagaacctggccctggccatgacccggatcatgtccccggccggcgaggcggaatcctggatcgagctttaccgcatcgagacgggacgggacggcctctccgcccgcctgacccggtcgctgcggggcggaacggcggtctccggaatcgtctgggcgcctcgggggaatcgcttcagctatacgacgcaggacaagaacggcggatcgatctggctcgtcgacgccgattcgggcgaaacccggccgctgctccggaatttcaagaacctcggctttcatgcttgggcgccggacggaaacgccctcgtcttctccgggacggaagaggggccgaaggattcggccttggccaagcgttaccgcgatcccgaggaccggcagccgggtcagcgcgaccgccggcacctttaccgcctcaccctgccggacggcgtccgggaaaggctgacggccggagagctgtcggctgacttcgggggattttctcccgacggtgcgacgcttctcttcacccgtaatccggtggatatgaccgagcgcccgtattcccggaccgagctctaccttctcgacccggctacccgcaaggaagacctcctttggaaaggagcttggttcaacggcgcccgtttcagcccggacggcaagactcttttagtgctgggcggaccttcggcgttcggcgggatcggcctcaatgtccccccggaccgccttcccaatgagtacgacatccaagcttatctcttcgatttggcggaccggacggcccggccgatcacccgggaattcaatccgtccatcgaacgggccttctggtcgggtgacggcaaggtcatccgcttcctgacgaccgacggggcgcggacgcggctctacgactacgcccccgccgggaaaacgttcgttccgcgcgaatccggcgtggacgtcatcgagaggatcgatatcgcctccgcggccccccgggcggtcttcgtcggttcctccccccaaactccgccccgtgtcttcctctgggatcttaaaaccggaaaaatccggccgctggccggccctctccccgggtcggagatcaccgccggaaaagtcgagacctggacattcaaaaacaggcggggcgtcgagatcgacggtttcgtcgtctatccccccgacttcgatcccgcccggaaataccccctgatcgttaattactacgggggaacgaccccgatcacccgggacttcggaggccgctatccgaaggcgctctacgccgcccatggatatatcgtttacgtacccgagccgagcggggcgatcggctacggccaggaacaatccgccttccacgtcaacgactggggggaaatcacgtccgaggagatcatcgacggcctcacggccttcctggccgcccatcccttcgtcgatccgaaacgggtcggctgcatcggcgcctcctacggcggattcatgacgatgaccctggcgaccaagactccgatgttcgcggcggcaatttcccacgccgggatcagctcgatctccagctattggggagagggatactggggatacacgtacagcgccgtggccacggccggcagcttcccctggaatcggaaagacatctatgtcgaccggagcccgctgttccacgccgacaagatcacgacgccgctgcttctcctccacggctcggccgacacgaacgttccgccgggggaaagcatccagcttttcaccgccctcaagcttctgggccgggaaaccgagctcatctcgttcgccgacgaaaaccatacgattatcacgtacgacaagaggattctcttcaacaaaaccatcctggcttggttcgaccgctggctgaaagaccagccggaatggtggttcgatttgtatccgcggaaatgaggagcggacgtccgctcccatttccacagtttatgtgcataatcttgtggaaatccccggaggggatttttctaaccccggtaaaagaaaacgattatgggaagttgcacaattttctgtcagcccgagcccagatgaaatttcttaaaataaacgccatcttttaatccttttggcacgttttgtcatcccaagccgcgggccgggagcggcaaaaaagcggggatctcggccggccggtctcaaaagacgtggccgaagttgaaatagagccgcattccttccttgctgaacccgaaatccacccgggcgcagaaatctttcatgaaaagacgcaaccccacgccgtaatcaaaaaccgtcttgcggaaattgatatcgccgaagctcggccagacgttgcccgcatcgatgaagacgttgccgccgaagatccaccagacggggaaccggtattcgacattggccaggattttccccttgtccaggaaacgattgaggccgaatcccctcatgacattgaaggtgttgccgccgccgagggaagccaaatcaaacaggggaatctcgtcgccgttaatatattggacgagtgtccggaaagcaaacacgtccttttcgccgaagacgcgctggtatttccgaaaatcgaacgtgacccgattgaaggaggcgtcgccgttgcgggaaaagctgacggcgatgtcgtcttgaatcaacagccggagcccccgggtcggatgaatctggctgtcggaggtgtcatacgccatggccagggagaaatacggcgcggatttcttcttcagccgcctcaattctccggccaaggggccgtcctggactccataataatcgatcgtccgaaacacataggccaccgaggcggaaaaatgcggggtgaagccgcggcccaccgtcagaaagagatttttcacctcgtgggtgagaatcgtctcgtcttccttgcgggaatccatcccctggccgtagtaagaatatttcaggaacttgtcatattcggccttgaggtcgaaggagagaggatacgtcttcccctgccggatctcgatgtccgggagggaaaacgtaaaaacataccagcgctcccccttggaggaattgaacaggatcaagtcgaaggattccttgattcccaggaaatcgacgagcttggctttggccccgtagccgaacccgatgtcgttgtcatacatcaggatcggaagggcgctccaggatttataggatccgggtgcgatgcccgtgttctcggcggacgcgtcatttgcggcgaacgccagcgaggccggcagcaatatcaacaaaagggccggtatcaatgtttttttcatgttcttctccttccccgatccggatctactatatgagattcccagggaatttcaagcttgcccgcggccgcggcaggctttgacgcagagtccgcagatatgctggctgaccagccggatccggcggaattcatcgagcttttcgaaacaagcccgatgatcgaattccgcgggattcattttaatggcttcggccgggcaagaagccaggcaggcggcgcaggtcccgcaatccgccttcgtctgaatcccggcttccagcggcatgtccgtcagaaccgtgaccagccggagccgcgatccgaaggcgggatgaaccaaaagattgttgcgtccgatgtgtcccagtcccgccaggacggcgagctttttgtgggaaacgtgggccgtctgcctttgggaatcgaggatctgcgaggccggtatcggcagggcgagaaagccggccgcctggatgcgggcggcgagccgaaacgcctcccggtccagaaaaaaattaagctggcggtagtggtggaaataaaggggagtgggacggtcgacgagatcctcaaggacgccgtccagcagccggacgccgagaaccgccgcccggacgaaccggtttcgaaggttttcgggcaggcggaatgtctcccgaacggaagaaacgtcagccaccccggcgacggaaaaaccaagatcccgggcggtttccctgagcctgtcggcgttttccctgggagaaatggaggaaaacatgtgatcgtattctaggcgcggcgccgggggactgtcaatcgactggaccggtccaatggatcaggatcgccttccccgtctttccagtgatctcccggaagcatgagacggaagaaagcccgcccttccccgcccggtttcaggggacggggacgaagacaatcaagccgagggtcgccgattgctcaagacgaagacggcggccgatacgctccgccgctcgacggcccggccgggcccgctctttccgcccccggaggcgcgtcagttgaaaagaatcgtctcctccggctcgcccaggaggatatatccggcccagtagaagggatgcggccggccgccgtggatcatccccagcttcgccgcctgcaacgcccgggacttgccccgcccggcttccaagtgacggtaaaactccttcatgaagtccgccgtcgatcggtccggcaccgcccaaagagtggctacgacggaccgggcccctccgtccaggaaagcccggggcaagccccccgcttctttgggcggagcgtcgccgcacgcggtccggcatccggacaagacaacgagatcggcggccaagcccagcgcccgcgcctcctcggctcgaagcagaccgtcgtccccggcgcttcggcaaagaagaagcgacgaacgccccgggtcgcccgcctcggtcgttccatgcccggcgatatggacaagcctgtagcggccgccgcggtgccgccggagagtcgcctcgctggccgccccgtccaggtaaacaaaacgacggttccggtcgaagaatcgggaaacgcttcggatttcctcccggacccccggtatttcctcaaatacggcgtccgcttcgccggccccggccgggcggtccgggacggaagcgcccatggccaggagacaagagccgccgggctcctcttccgaacggtcgaggcttggaccgaatcggaaaggcgcgtaggaaatcgcgtatctctcgaccaggaaccctcggccatcggccgtccgaagcgcctcgaacgggagacgacacaggatgccgtccgggatcacgattaagcaatcgactcccagggcggtcaatgtccggtcaaaaggaatcaattccccggcgattcttccggccgccgcggccagcgaccgccgtgaggccgacggccgggctgtttccttgatgaaaccaaggacgctccgctcaatgcgtccggccgcgggaagaacctccgtccatgttcgatcttcgacggaaatcctaacccgggattccttttcgccgaggcggtattccaagaccgcccggtttccactgcctggacggttgaagcccgcgggagcgctccccagtgcggaaaagagccgctcggccggtttccctcccgggcagctcgaaaaaccgagcgataggaagcccgccaggacgcccgaaattccggccctcgctagttccgtgacctccatattcactttctcgaaaacgaacaatatcatcaagtcgaaaaacgagggggaaaatggagagcttcgggggacaacgcccgcggccgctttcaacggttccgggtccggcgcgcgggacggacggacgcccctcccggccgtctttccatgagcatccgcttctggtccttgatttcctgaaatgtccgggggacgtagacggattcacccgtccgcggatcgcgccccgtgtggtacatcgccgtcgagagggtcatcggcgccggggtgaagatctggacgccttcaaccgggcggtccccttctttttccagccgccggacttcccgggccagctccccggcctcgcgggggccgcagccgggatgggcgaccatgaaataatatttcagatgccggcggccggaaacgtcggccttccgaaaggcccgccggaatttctcaaaggccccgccggaatccttgttcatcaagcggaggacgtttttcgaaacgtgctccggggcgatcttgagaaggcccgagacgtgatgcccgacaagctcgcggatgtattcctcgctggacagggctaagtcatagcgaaccccgctccggacgaagacgttccggacgccggggatctcccgggcccggcgcaaaagcgagatcagccgttcatgtccgggacggcggccgcagtccaagcaggactctccgcaggccgcttcacaatccatcccgtacatgttggccgtgggcccgcccaggtcgtcgatcgatcctttgaactcgggatgacggacgagccgccggatttcctccaggatcgattcctcggagcgcgagacgatcgtgtcgccctgatggagggccagggcgcagaaggagcaccggccgaagcatccgcggtgggagacgaccgagaaccgggccatcccgaactcggggaaatccggcggaatgaggcggctgtacggcagaccgtaaatccggtcgaggtcggccggagtccagcgcggggcgggatactgaagaacgaatcgtccggcgtggccctgggccaacggcgtccggaccgagagtttcatctgggcctcggcgaaggcgtccggggagccggccacggcctcggccggaggaaggaggacgaaatccgcgggaacgttccgggagacgacacaggttccggcgattccctgcaaatcaagtccttcttccagacgacgggcgatttcgacggccgccttctcgccgggcccgtagaccaggatgtccgcccgggcgtcgacgatcaggctgcggcggacccggttctcccagtaatcgtaatgggcgaaccgcctgagcgaggcctcgattccgccgaggacgatgggcgttccggggaagagccgccggatcttgttggcgtacacaagaacggcccgatcgggcatggccgtcttccggggcgcgtgggggtctttctcccgccgccgcttgagaggcgtggagttggccaacaggctgtcgatcgagcccgaggtgatcccgaaaaacagccgcggggcgccccattggagaaaatcggcgtccgttttccaatcggggtgttcgatgatcccgaccgtgcggccctcggcctcgagaacccgggcgatgacgcccgaggcggaaagaggatgatcgacgtggatttcgccggtgatcagaacaacgtcccgtcgcggcgggcggaggccgttcatttcaagtccgggcgggagctcagggctccctcgggatcccccgccgctcccgggtgatccggtccacggcgcgctggatggttttcatgaggtcgagcggcttgaggggtttggagacatagtcgtccatgccgacggcgaggcatttttcccggtcgccggtcatcgcatgggccgtcatggcgatgatggggatatgggcccccgtggccatctcccgccgccggatttccgtcgtcgcctggatcccgtccagcacgggcatctggacatccatcaagacggcgtcgaaccggcccctattgagggcctccagcgcttcggctccgttgccggcgaccgtgacccggtggccctggttctccaggatgcggacggccagcttttggttgatgatgttgtcctcggccaggagtatctcataccgggcgggagagcggcccaaggaatgacgggtgatcaagggggcttgggcccgcttttcgggggagatccccacggccgccaggatggcatccagaagaacggccggcttgacgggcttggtcagataagccgtcaaacccagcttccggcaatgggctgaatctccgcgcagtccggccgagctcagcatcatgatttggacatcggcgtattccggcatcgtcttgacggccgcggccaaggcgaacccgtccatgcggggcatattggcgtcggtgatgacgaagcggaacggccggccggcggccgcgcgctcgcgcagcatgtccagggctttctcgccgctctccgcctgcgccggcttcagtccccattgggtcaggaggtcgttcaggatcatccggttggcggcattgtcgtccaccacgaggacgggaagatccaacaggtcttcataacggcttggagcggtttcctcctccggctgcgtctgaagatccagggggacgatgaaatgaaacgtgcttcccctgtcgagcacgctctcggcccagatttttcctttcatcagctccacgagctgggcggtgatggccaggccgagccccgtccctccaaaaagccgggtggcggagctgtcggcttgggtgaacggggcgaagatcgatcggagcttatcgggggaaatgccgatgcccgtgtcgctcacctggaaatggagcttcacccggtcgggaaggcgctcttccacgccgaccgtcacgatcacctcgccggcggacgtgaacttgacggcattggagatcaggttggtgaggacctggcgcagacgtccgggatcccccttaacccggtctggaacgtccggggcgacatgataagccagctccaatcctttcttctcggccaggagggcgaccgaggcgatcatgatgtggatcgtatcccgcaggcggaaggggatcgattccatctcgatcttcctcgcctcgattttcgagtagtccaggatgtcgttgaggatccccattaaggatgcggccgaatactggaccgcctccaggtactcccgctgctccgccgtcagatccgtttccagggccagctccgtcatcccgaaaacgccgttcatcggcgttcggatctcatgactcatgttcgccaggaattcgctcttgacccggttggcttcctgggcggcttcctcggccttcttgatctcggtgatgtccgtgtacacgaacagcgttccgacgatttcgccgccgctgcggatcggcgatccgccgaacaaaacggggaccggccggccgtccttgtgcaggcggacgctttcccgggggggaagcgccgtcccggcgaaggtcatctccgtcaggcgggcggcttcgccttggagatccttcgcgacgatcaagccgtcggcttcctttccttgcgcttcctcccgcgcccagccgaagaggcgttccgcgcccggattccattcggtgatccggcccttgggatcgacggtgatgatggcgttcggagcgttgaggaggatcgattccaggtactgccgccgcttgtccaactcccgctcggccgcttcccggaccgcgatctgcgtttcgagctcggccgtccgttcccggacccgggattccaaaaatttcgtccgccggcggttccgccggatgcccgtcgtgatatacgcgccgagaatcgccaggattgcggttccggccaaccccaggaaccaccatgtcctccagaacggcggaatgacgcggatccgcaaggcgaccccgtcgttgttccagagcccgtcggaattggacgccctgacccggaagacataccggccgggcgggaggttggtatagctggcgaacctccgctccttgaccgtgatccagtcctcctccagtccttccatcatataagcgcagacgttgtcctcgggcgccgcgtaatggagggaggcgaattcgaacgtaatcagccggtcccggaatgtcagctcgatctccggcgtgctccagatcgcctgggccatgacgacccggccttccacttcccgcccgatgggcacggatttattgtagatctggaaatcggtcaggacgacgtccgggggaaaaggattgtcgacgatgtcgctcggaaagaaatagttcaagcccgagacgccgccgaagaacatctcgccggccttcgttttgaacgaggatcccccgagaaattcgtttccctggagattatccgacacatcgaacgatttgacggccccagtgcggacgttcaagcggaagaggccggcgttggtcgaaccccagatctggccgccctcgtcgatctgaagagcgtagatcatggcgttgggaaggccctcggcgaccccatacttgacgaaggtctccgttctcgggtcgaattgattcagtccgtcggccgtcccgatccaaagcgcgccgctggaatcctgggtaatggccatgacataatcgttgctgaggcttcccggatcgccgggccgtttccggaaatgggtgaaggtttcccgggcccggtcgaaccggtccaggccgccgccggccaagccgatccagagcgttccggaggcgtcctcgaaaatcgcccggacgaggtcgaagccgagcgaatccggccgggcgggatcatgcgggtaacggacaaaggcgtttttttccggaaggaaccggttcaatccgccgccgtcggtgccgacccacaatgcgccggcgcgatcccgcagcaagcaacggatggaatcatggctcaggctggagggatcccgggagtcgcggcgccaatgttggaacgactcggtcctcgggtcgtaacggttcaatccccccccgagcgtcccgatccaaagcgccccgccttcgtcgaggctcaaagcatagacggcatcgtcgctgaggccggacgggttgccgggatcatggcggatgaaggcgtgcgcgccggtcgtccggttccaatactccaggcctttgtcctcggaggctaaatacaagttccccgcctcatcctcggcgaacgaccggatcaagttggagatgagctccttcctcccgccatggatctcctgaagcttgtgaaacttgttccggtccgggacatatttattgacaccccgtccccgcgtgccgatccaatacacgcccgtccggtcctcgatgatggatataatgttggaagagctgagactgtccgggtccgccggatcatggcggatgacggtgaaatcctttgtttcctcgtcgaaaatgttcaatccgtcataggttccgaccaggaggcggcccgcccggtcccggtaaatgacgttgatgacggcgtggctcaagcttcggggatcgcggaaatcgggaagatatcgggtgaaggttcctgtttgcgggttcaaggcattcaatccgccgccgtttgtccccacccaaagcgttccgtcctcgtccaggaacagcgtgtttacctcgtcgcggctgaggctgcggggatcgtccggatcatggacatagcgcttgacccggcccctcgcccggtcgaaggcgtgaagccccccgttcgtcgccatccagagaacgccttcggcgtcctcgaccagggatcggatcgccgcgggcgacgagggaacccgccggcgggatgtccggatataccgggtgaatgttccggttttcggatcgaacgcgttcaggccgttttcggttccgacccaaaggtccccggaccggctttcgcagagggaatacaccatgtcgtggctgatggttttcgggtcgtccgggtcatggacgtagcgggtgaagtcgtcctgttcccggttgtagcggttgaggccggagttggtcccgatccataaaatccccccggagtcctcgaacagaacggatcccgtcacgtcgctcaagctcgccggctcctcggtcacgcgatagacgcggaagcgtcggccgtcgtagcggtccaggccgtcttcggtcatgatccagatgaatcccggccggtcctgaacgatcgatatcccggaaccctgggacatcccttcgttgacggaaagacggacgaaatcgttcccgaagcggcgcggcggcgcctccgcccggaggggcgcgacggccgctccgccgatcaaaaccaggatgaaaacaacggacgaaatcagccgaatcttttcccggccgcgccgccccgggccggcgtcggtcgaaggacggatttgagggacgaaaaaaaacgggaatcgatcacgtaaagaagccccgcccatgtccaatcttccgccaagagtgtatcttcggggagagaatcttgtcaatcttattttccggtcggacggtaaaaaaaagcgcctccggacgatgtccggaggcgcaacggcctccatccggccggaggattactttttccggatctccacccgtccgctgaagctcttgatccggacggtcgccccgccggtcccgaccgtcccccgcaattccttgggggaaatcttgccggacacgacgacggggaaatcggtcgcgatatggccgctgaaggtctcggcctcgacctcgaaggcggccgacgccgggagcaggagcgtgatcccgccgctcagggcatcaaaactgtagcggcccgacggcaggatttcggtttcacaatcgatcccgccgctgacggtcttggcccggacggaggaggcctcccggacattgccgagggtgatgccgccgctgacggtttcggcctcgatggagcccttgacgtcctcggcccggattcctccggaaacggccttgaggctgaccgcgccgcccgcgccgcggagggtgatcccgccgctgacggtcttgcaatcgaccgttttggcggccccggcgatccggacgccgccgctcacctcgtcgatgtcgagatcgccgccgatcttctggacatcgatatcgccgctgacgttcttcacccggagggacgcctggtcagggatggtgaggacatagttcacgctgacgctgagattattgccgcggaacctccgttcgggatatttcgtctcgatccgcaggacgccgccttccttgacgacctcgattctcaccaggccggcgttttccttggcttgatcccgggaggacgccttggaaaccttgagagcgtcgatccggacttcggccttgtcccaactccggacctcgatggttccggagatgttctccagcgaaacccggccgttgcgatccaacgcttcggtccggtcgaatttctcctcgtacgtgtctcttgcggccagacttccggcgagaaggaagacgccgaaaacggcgatgacgacggctttgttcattccgattctcttcatggctgttctccttcctctcttcaaagggcgatcttgccgctcaggggagcggtcgattttttcttcgcttcgatgatgttttcaaggaactcgaccttgcccttgtacgcgcccaggaggtagacgcgggcctcgacgttccggggatcgcggaggacggcctcgcggcaggaggcgatcacggcatcgatcgtccggaggtcccggtccagggcttccatcgttttcgcatcgagcccggtctgctgcccggccgcggcgtccgatagagcccggatcgccagccggtaatggatttcagcctcctggagcttggccatcgcgtattcgccgccgtttccggatgacacggccggagcagcgggcttccgggagggaagaatcaagagagcgcccccgacgacgaggacaagagccaaggccgcggccagggcatagcggggacggcccggagcgaataaccggtcccaccaagacacgctcagaaccgcccgggcggatcgctccctccgctcccggcggacggcgtcgaggatgttcggccagacggccggcgacggttcgatccgcggaagagccgcggcttgcgttttgatctcctggaaatcagccagcagctcccggcagtccggacaggactcgagatgttcctcgagggcccggcgatcctcttccctgatcgtgccttcgagcagttcgccgatcagctcatgggcttgagtacacttcatggtcgtctcctagcagacgcctttccgctccagaaagtcccgcatccggagccgggccttgaaaagctgggacttcgacgtcccgacggaaagaccgagcatccgggcgatttccgagtgcttgaatccatggacatcatggaggaggaaaatctcccggagcttgcccggcagggcggcgattccgtcgtccagcggccggcgcatgtcgcgggcgggattttcctcggtcgcgccgcagcgggtgccttcaatgtcctccagggggattcctttctccatttcaacccggcggctccggagatggctgtagcatgtgttcaacccgattcggaaaacccagccggcgaacgtgtccggattcttgacgttatccaaatgggtgaagaccttgatgaagatttcctggagaaggtcttcggccgtcgcccggtcataggaatagcggaacgccagattgaacaagccggttttaaaacggcgatagatctcctccatcgcctcggtctcccccgcccgggcctgaatgatcaggtcggccagctcttccgattcgatgtcgatcatccggacgcccgtttcccgcctggaatacctcacgaaggcattatcgccgaattcaaggctgggggaaagcgccgcttcctgaatcatcgggtttctctccacaccgccatagatgatcaatccagggaaaaggttgccttttccgcaaacatttcatccccgggaaggaaaaggtacaatagagggcagagaagcggctcatccgaccatgagaagcctttcgtcccgccctatcggcccgttttcggccgtttccatgctgatcctgcttgtcctttccgttttcctcccggcttgccggccccgggcccgggttttgcctctcggccccgcggcgggccccggcggcggcccgccgccgggttaccaagttcaggccggcgccttttccctcgaggacaacgccgcccggctcacccggtctctccgggagcaaggctggaacgccttctatctttttcacgaaacgcgggtgttcaaggtccggatcgggccgtttcggacgcggaaggaggcggtcgaggcggccgacgcgcttctcggccgccgtctcatcgccgatttcctgatcattccccccggaagcgaaatcatccccgggccggccggcggaacggaggacgacctccgcgaccgcctggcctccaccgccctcggtttcgtggaatttccctatgtttggggaggcgcctcgcccgaggaagggttcgattgcagcggcttggcgatgaccgtctaccggatcaacggccttttcctcccccgggctctgaccgagcaggccgcggccggtcgggccgttcccgccggccgggcgaaaaaaggggacctgatctttttttccatggataaaacagtccgggcgtcccacgtcggaatcctcatcgggggaaaccggttcgtccacgctccgggaagggaaaaagccatccgtccggattcgctggcgaatccctatttccgggaccgtcttttggaaatccggtcctatctttaaccgcaggcgccgcggacgcccgttccgtttttgtcggaaaacggaattttggaaatcccttccgccgggtccgccgcgcctttggaagacgagacgaaaggccgcccctcctccgtttcggacctcgaggatctcgagaccggacgcccagggggccgcggcggcgatccgcttgcttgcccaggagatgagaatcctccagaacggcgatggccgtcacgggcatgggacggtttcgcctttcgggcgccgaaggaagcgggacgaaatcgatgacatcctcgacgatgcggccgcccgcgtcgattcggaaacagtcaatcgaacggcggcccggaccgaggggaagccgacgggccggacaattcgtaaaaaaagaaacagcgaacggaggaaaaaggatggtggacgttgggggattcgaacccccggcctcagcgatgcgaacgctgcgctctcccagctgagctaaacgcccacgtcgggtgcggataccggggatatcctagcatgttcggctgaaatttgccaccagttcggacgggttcccggaagggggacatgcggctttccgcatgcatttgcattcggccgatttttccggtatgaatattttcgacactccggcgggaggtgcctatgagaaaagcgtcccgtttcgcgttcgcggccgcggccgcggcccccttcctcgtccttcttctcgcggccccgcccccggagaaaaaatcctacgacgccttcgagacgccgcgccgttgcgcccaatgccatcgggagatccacgtccaatggaagcaggcgatgatgtcccaggcttttacccatccctgggacgaaatcgaatactttcagctggccgtcccccaagcggaaaaggatcccaaggtcgccgaggtgaaagccggctgcaacggctgccacgccccctcggcctttttcatcggggacgttccgccgccgcgtcccgccgccggaagccgggccaacgaatccgtcttttgcgacatctgtcatacgatcaccggaaaaagcggggacgtcccggtcaacttcaattacgtcctctcccccggccggacgaagcacggccctcgggagggcgtcgtttcgccctatcacgagacgcggtattcggatttcgttcgttcgccggaattctgcggaacttgccacaacgagctgaatccctacggcctctatgtcaagtccactcagctcgaatggcaggacggaccctacagccgacagggcgtccgctgccaggattgccatatgtggcacgctcccggcacaagcgccgacatgggctcgcccgtcgaggatatggcccggcacacgtttccgggagcccacgttccctccaaggtccggggggcgatcgagatgaaaatctacgccgacgccgacgagctcgagccgggcgagaaggccgtcatttccctccatctctacaacgccaaggccggccacaagatcccgaccggctcggtggaggaccgccagctctgggtcgaggtccacgccgtcgacgccgccgggatccgctacgccctgccggtggacaaaaagggattcccggacgaggagtacacgatcacctccaacgccccggcttaccaagatatgggcgacatgatgatggatctgcccggatttccgggcgtctcccgggacgcggtggccgaggaaggccaccgggtctttcgcatgccttatttcgatcccaagggccggatgacgatcggccaatggaacaccgcctccttcggaaccgactaccggatcggcccccgggaaacgaaaatcgaaacctattcttggacgcttcccccgactcttcccgaaggccctctccggatcgaggccaagctctactaccggctgctcgtcaaatcggtcgccgatttcctgaaggtcccgcccgaggaatccgccgccctcgaggtcaattcggccgaaaccgtcctccaggtcgtcttttgaggagccgtcgatgaaaaaaatcttcgccttcctggtcctcgttgccggcctcgttcaagccgccgcggccatcccggccttcgcccgcaagtattcctattcctgcgacgtctgccatgccccggtgccccgcctgaaggcttttggggaggagttcatggacaacggctaccgcctcccggacaacgagccgccgcgagcgacgatcgacacgggggatccgctcctccttctccagcgcacgctgcccctggccttccgtttcgatgcgtacttggcctatgagccggaagccgacatcactggagatttccgggctcccttggcgatgaaaatcctcagcggcggcaacatctccgacgatatttcctactacacgtatttcctgatggccgaggacggcaaggtggccggcctggaagacaccttcctgagcttccggaacgtcttcggcctgcccctggacatgatgttcggacaatatcgggtcagcgaccccatcaaggccacggaaacccggctgacggtggagaattacgccctcttcaagttccgcgtcggtgacagccgcatcaacctggcctatgaccgaggcctcctgctttcgaccaagacgggattcgggctggatgtcatcgcccagatcgtcaacggcaacggcatcgaggagcaggagattttcgactcggacaaatacaaaagcgtcgtcggacgcctcgcccagagcttcgccggaggccgggtccgggtgggcgtcctgggatacgccggcaaggaagccggggcgggaggcgcggtcaatgcggtcacctatctcgggccggacctcctcctgcgcctgccgaacgtcgagatcctgctcgcctatgtcaagagaacggactccaatccgctcttccagagggagggccgggagcaaacgagcgaggccgtcctggccgaggcgatcctcagtccctggggcgaacagggacggacgtttttcaccctggcctggaaccgggtgaattcgaccttggaggtggacgatgccaacgccctcaccgtgaacgtcagccgcctgatccgaaggaatctcaagtggacggccgaatacacccgcgacttcgagcggaaggaagaccggtggctgacggggatcgtcacggcgttttaacccccgccggccggacgacggaatgaaggaaaaaaaacgaggggcccggccgcgtcggatttcggccgcggtcctgattccgtctttcctgggcgcgctggcctgttctggccccccgccgccggccggctcctcccatcccgccggggcggccgcgcttttttcccgggagcgggtcaccatcgccgtgaccgattcggggctcggcgggctttcgatcatggccgaggccgcctcccggatgaaggcggctcgggccttccggggcgtcgacctcgttttctggaacgcccttttctccaacgacagcggctacaacagccttccgtcccgggaggacaaggtccggattttcgacgcctccttgcggagcctggccgccgaggtcaagcctgatctcatcttggtcggctgcaataccctctccgtcctgctcggcgacgtccccttcgcccggaccgcggacgtccccgtcctcgggatcgtcgacacgggggtggagatgatggccgaggccctttcccggaatccgcgggcggccggccttctcttgggcacggcgacgacgatcgccgagggggagcatcggcggaagctcctcgcggccgggatcgaggaggagcggctggtctcgcaaccgtgtccggacctcgtcggcttgattgagagcgattggcggggagaggaagccgcccgcttgatcgagacctatatcggcgaagccgcggaccgccttccggacgccggcgccccggtttacgcggggcttttctgcacccatttcggatacgcctcggccctttgggagcgcgccttcgcccgccgcggcctcaccctggccggtctcgtcaatcccaattcccgctgggtcgatgccctcgatcccccggcccggagaaaccgcttccccgaaaccgaggttcgggcgcgggtgatctcgatggtcgaaatcccggccgccgtccgcgacgctttgggggaatggctccgcccgctttcgtccgaaaccgaggacgcgttgaaaaattatgatctccggccgggtcttttcgagtggaaatcgcttttgaagagcgactaaccgcgccgcctgaaaaaaaagccggccggaatccgccgccaagccggctgcggtcttccccggatcgctgggatcctcgtcccggctgagttcatcgaccgccgcggcttcctggtccttattttcctgaagcggattcgaccgggacctgatccggccggttccccgtcccggaccggcgacggctactcgacgacgacgccggaggaatcccgcgtcaactcgccgatcacccaagcccgctggccccgggcggcgagccagcggatcatccgcccggcgtcggccgccttgacgacggccgtcatcccgatgcccatgttcagcgtccggtacatttcggcttcggcgacgccgccccgctcctggatgacccggaaaatgcgcggaacgggccaggagcgcttttgaatccggacgccgcagccggcgggaatcacccgggggatattgtcgtagaatccgccgccggtgatgtgggccatcgccttgatgtcgatcgcggccatggcttcgagcagcaggcgggcgtaaatccgggtcggacggaggagcgtccggccgaaggggccggcgagctccttcttcgtgaacacgcgccgggcgagcgaatagccgttcgagtggaggccgctggaggcgagtccgacgacggcgtcgccgggacggcatttccggccgtcgatgagccgggacttgtcgaccaggccgacgcagaatccggccagatcccactgatcctttccgtagagacccgggagctcggccgtctcgccgccgagcagggcgcagcccgcctctcggcacccccggacgatccctttcaccacctgggtgagcatcgccggcttgactttgccgcaagcgatgtagtcgaggaaaaacagaggctccgcccccgtcacgaccacatcgtcgacgttcatggccacgaggtcgatcccgacggtgtcgtaccggccgaggatgtcggcgatcatgatcttggttccgacgccgtcggtcgaggaaacgagcagcggctctttcaaccctttcaaccggggaaggaacaggccgctgaatccgccgatccctccgagaacctcggggcgcgaggtcgtccggaccagcggcttgatccggcggagaaagtcgtcggccgcggcgatgttcactccggcccggcgataggtcagggatttcatgggcgttcctccggggaaaaatcaggccgtttataccacgcccccggcggcccggtcaaaccaagcccgaaattccttgacgggcccgccggccgatttatagaatggagatgcgggagagtctgatgggtggaaagagaaagaaggaaaaaatcgtcgtcatcgggggaggaacgggctcgtacaacgtcctttgcggactgaaaaagtatcccgtcgacctcacggccgtcgttacgatgatggattcggggggaagcacgggacgcctccgcgatgaattcggattcctcccgccgggcgatgtccggcggtgcctggtcgccctttcaagcgataccggcctgctccgcaagctcttcgaataccggttcgaccggggctcgggtctcagcggacacagcttcggcaacctgttcctgaccgtcctgcgcgacctcaccgggggcgacgccgcggccgttcgggaggcggcgaaaatcctgaatgtccgcggccaggtcctgcccgtcaccctgaacaactgccagctcggtgtcgtcctggaaaacggccagaccgtcgtcggcgagacgaacatcagcattccgcggcacgatccgcggctccggatccgctccctgttcgtcgttccccgggcccggatcaacaaggaggccgaggcggccatcctcgaagcggacaaaatcatcatcgggcccggcgacctctacaccagcatccttccgaacatcgccgtttccggggtcaaggccgccctccggaaaacccgggcccgcgtcatttatgtctgcaacatcatgaccaaggcgggggaaacgctcggtttcacggccgtcgatttcgtccgggagctggagcattacctcggccggggaatcgtccaggacatcgtctgcaacgaccaaaagccgcccgcccggatgttgaaacgatacgcggccgagagggctgaattcgtcgagccggatctcgaggaaggccgcgtccgccgggcttccctgctgggcggccgcgacctagcccgacatgattccgaccgtctcgcccgggtcctgatgagtctctgacctccccggttctccgggcgggctccctaccgggggcttcggatcttcaccgtgaggatctgaaagggcttgagatcgacataaatcgaccgggggacgacctcaaaggcattggccggatgctcgccgatgtccgtcgccgtatacgtcagcgtttcggccgtgaacaggcttgaggacacccgggtcctcgtctcccgcccggcgatttccctgagccggagaacgatcccctcgcccgattcgggggccgtcaccgtctggatcaggacgttcggctgatcgacggcgaaaaagctcagggaatccgcgggaaggacgccggccgtttgattcggcagccattccgcgagaagcggcgtccgggcttccgccccgaaccgggccgccgcgacctgatcggagccgcccggccggctggtgagggcgtagcggaaaacgagcgggccgccctggctggccttaaaattcgtcatccagtagttgttgaggacataggaaaaaacgaaggggcgggcgacatccatcttggcttgccatttcccggtgttgatgtcgccgagctggacgaggggggcttccagcggagcccagaccaccgtgtttttcgtcccggccgcctcgatccagttctggacggccagccagtcgcgggtcgttcccggaagcggatcggcttcgggagacatcacggcgtccgcgatttcgagccggagccggccgttctccacccggaagggaaaggcgaaatacgcggcctcggcttcggtcgtctcctccttgcgcatccggttgatgaaatcgatccgcttgagatcatcgtaaaggatgatttcctgccggatctccggaaaccggaacatccgggaggaaaggacaaggctcgaggcgaccggcccgcggaagccggcggacacggcggcggattccgggaaataccgccggaaggcggcccgcttggaccggtcatcgacggcttcccggccgccttccgggttctcgtaaatcagctggttaagcccgaaggcggaagccggatcgaccagctcccggtccgtctccttgtcgacgaggcttcgcagcccgccggtgaccggatcggccgtcacctggaaaaatcggttttcgatccggttgtcctcgatcaccgctcccgcttcggccggcgcggaaggctctccgggagcagccgtgaagacggcatagccgatcgaggggacgttctccgcccggaacatcaagatgttcgggtcgaggatctggaagggaatttccgctccggtccggttgtcgatcagacggaaccgaccctccagctcggccaggaggcggggcagaatgacccggacgacgtccgtccggctccaggataaggggttgaaaacggccaggggcaggccgtcgccggtcgtaatgccgcgggccaggaccgccaagctccggtcccggacggagccggcgatttcccgggcctcataggcatgggacgatttttgaatccactggccgcggaccgactccgcctccggctcgctgatggaatcctgcgagccccacgtgtgctcgtcaaacagcatggcctgggcatagccgtcccggatctcggctttcgggaacggcgccccgctctcaaccagggaggcggccgcggccagcttttcagccgtcgttaaatcgtcttgggccaagcggttgagcccggtttcataagccgtcgagccggcgccgtccgtccagtaatcgggccaggcttttttatggacggggagggtcgcgccgtatcgtttctccagaacccggaaaaattcgctcatcgtcgccaggcggagccggggataggcccacttcgcgttccattcggccacccggtcggacaactcccgtttcggcggactgttgtccaccggccggccgctgatcggaaaagcgatcaggtcatagggatagtccccccgggcttggaggccggacaggtattcagcgaggcgcggctcgctttcggcgtttccttgatgaagacggagctccaggttggaaaacaggtaatgctcgccgttccagacgaggactttcgccccgtcgggggattgccagtagaagggattcggcttgcgaagcggggctcgggcccgcgtctcgttgatgccgacggcgaaataatggattcccgcttggctgaggatttggggggaagcccagctgaacccggtgacgtcgttgttcatcgccgccccaagggggaaggccagggtccggctgaaatccttggccggcaggacggcccggacgagctcctcgtggccgaacagatccgaaagctggacataccagcccgaaagctccactcggccggaacgcagcaggccggccagcgcctggaccttctccgccggccggctcttgatgtaattttccaaggcccaggcgatctcgatgttccagcggaattttgcctcgtcgggataggcctcggtcgcccggcagaactcgatgacccggtccaagtattcggcttggttcttggccgcccgggacggaaaatcggtatagccgaggtccgtgtgggaatggggccagaggtaaaccgtccatttccgctggggcgcgagaacaaggctccgggaggccgtgctgtttcccacccgcacggaaaactgcgccctgaccggccgggcgtgatcggggagatgaacgacgacggagtgcctgcccggcccgatcttcggaagggcttggcggatctcggcggcgaatcccctgatccgcagctctccgggcgcctccggtccggcatactcgagaaccgcctcgcacttctgaagaagcgcgcccgcttcctcgacgaagaagaccgtcggcaggacatccagcttgagccggcccgcggccggcggcggaccggcgaaggatccaacggccgccgataaaaaagaagccagcacgcaggtccataacggacgtttaaaaaatcgcatcggggccgcctccttgtccggtcaagccggcttcattgtacacgaaccgccgcgaaaacggacatcatttcccggcgggccggtttgggttagaatggacgggaggcatgtcatgagcgttatttttcggagggcggcggcggccggtctcggcctggccgtcctggccgccggccttctcccggccggggcatcgatgccgtccttgtcctggacgatccaaacgagcggaacgtccgaaagcctgcgcggcctgtccgccgtggacgagcggaccgcgtgggtttccggatcaaagggaacggttctccggaccgtcgacggaggggagacctggacggccgtcccggtcccgggcgcggaagaggctgatttccgcgacatcgaggccttcggtcccgaagaagccgtcgtcatggccgccgggcgcccggcccgcctcttccgcacggccgacggcggccggacatggacggaaacgtatttcgacgactcccccgggatcttcctcgacgccttggccttcttcgacgggatgaacggcttggcgctcggagatccgatggacggccggttctttcttctccggacttcggacggaggaaggacgtggcgttccctcccgctggaatcccgcccggccgccctcgagggcgaggcggcgttcgccgcctccggaacggcccttcacgtccgggggaacgcggcttggttctgcacgggcggggcggcctcgcggatatggctctcctccgacgggggcgtccgatgggaagccgtttccgctcccctcggcggcggaaccccgtcgtcgggaggattctccgtttattttctcaacgaaaaggccgggatcgccgtgggcggggattaccggaacgagccggccgacgcggacaacgccgccgtcaccttcgacgggggaaaaacatgggcgccggtttccggccggcggccgggcggattccgggaagccgtcgcggccgtcccggaagacccatcgtctccggccgtgaccgtcggcccgtccggttcggacgtatcgttcgatggaggacaaacctggatcgcgatcggcggtcccgaaggatttcataccctcggtttcgccggcaacgggctggcggcctgggccgccggccggaacggcctgatcgcccggctcgcctttcaataagcggcctcatcggctttccaagagagccaagccgatccgccctcagaagaatcccgatcagcgcgggcggcggatcctgagagcgaccgccggatcttcgccgtggcggacgcttgcaggcggagggccgagcctcccgccccgcccctcatccgaggcggcgcgtcccatcgtccttgaaaacgagggccggctcactcccgatggaaatcgtcgtcattccctctcaggcggacgccgaggggtccggccgagccggtttcggatggaattttgaaggactaaacgctgatcgctccctcgccgtcgatcgtccgttcgacgtaaaggtagcgcttgattttttgggtcggcgttttctcgaacggctcggtttgctcgatgacccggctcaaccgggagaacgaggccacgccttcgttgaccttcgccttgatgtcctcgagaagacggcggatgtgctcgcggatctgggaggcgctccattttttctcggagaaaaacgcgtccagggcttcgtagttcaggtggatccgggccaccaatcgcccttgctcctcgaagaccagagactcctggacggagtcggtccggttgatgaccgattcgatgacctcggggtagatgttctccccgctcggcccgatgatcacgtttttcgaccggcccttgatgtacaggaatccgtcggcgtccaggcatcccaggtcgccggttttcagccagccgtcggagaaggcttcggcggttttttcgggatccttgtagtaacccttcatgatcatcggaccgcggagctggatttctccttcgcccgtcttgggatcgggatcggcgatccggatctccacgccctcgagaggccggccggcggaccggggccgggtttcaaacggcttcgtccccgtgaccaggggcgccgtttccgtcaatccgtagccgatgcagtaggggaaacccgcttcgatcaggaaatcctcgacgtcgggggccagggccgccccgccgatgcagaacatattcaatttcccgccgaacgccgcccggattttcgccccggccttgcggatgaccatcttccgcagcgccgggacggcgcaggccatccggatcagggcttttccccggagagcgggaaagaccttggcccggaccattttttcgatgatcaggggaacggacaggacgaaggtcggctggaccgcccggagggcgggaagaagcaccgcggctgtcggcggcttgtggacgtaagagaccgaagcccccttcatcaagctcgtgatcaatcccagggtgcattcatagacgtgggccagggggaggagcgacagcaagcggtcctcgcagttcacatcgacgaggcgggtcgtggccaggacatcgctgacgaggttcccgtgggtgagcatgacgcccttggaatgcccggtcgttcccgaagtgtagatgatcgaagcgaggtcctcggactggacctgcgaggggatccggcccagccacttcaaggccatcgccttgatcttgcggagctcgtgactgccctcggcgatcagccggcggagcttgtccttgctcgtatccggtttgatcacggaaaaatcatcgatcaggatccgcgtcttgaggtggtcgaaggacgcctcgtcgatcttgccgtacagcttctcggagacaaagacggccttggcctcggaatgccggagaacgtgatggatttccgtcggactgaaatccgtcaggatcggcacggcgacggcgcccatggaggtgacggccaggtaggcgacaccccagtggggactgttctcgctgaggatggcgacccggtcgccgtggacgattccccggtcggccaggaaggccgcgatctgatcggttttatccttcagctgccggtagctcaaggcgggcgaatcgtagaaaccgagggcgtttctgttttcatagagctccgcgctcttggccagaatggccggaatcgtcaactcgtttttatgttccatgtgactcctcgagtcccggcgcgcgcccggtcggcggcccggcaacgcgggcattgtaacgcaaccccggaccgaaaacaaaggcacgaatcgcgtcgtccctgatccgatcgatcatctccggtcaataatcgaaacggggggcgatctcctcctcccggataggttctcaagcggttcgaccagtggaatccgcgcggccggcgggtcagaaggcggccggacgaccggccttgtcggggaccgggaggtgacagggagtgcaatcgatcggcaggtgggaatggggccgggagcggaaaagatcaaaatcggcctcggaaaaagggacgccgaggagaatcgtagccagatcctcttccaaggtattgtcggggacggccacgatccggcctttctccttcccttccacctggatgatgatcgtcggaacccgttccacgccggcccggcgcgcctccggcggttcccgcaagtcccgggaaacgccgatccaaacgacctcgatggccggattaaaggcttcctcgagcgtcttgagaagggccgcgatcagctcttggccgttctcgtcccacgtccccaggaagacttcgatccgggcgggattggcgaagccgcgaaggccgtcgatcgcccggaaatggggctcgtactcccgggcggcccgggccgctccggggagagcctccaggacgcgttcggagtccaggaggccggtcagaacgaccgcggccgccggcgcggcggcgggaacggcgatcgactgaatgaacagggcgacggcggcggcaccgaaagcgggccggaggaaagtcggggttttcatcgggggacgttttttcccggccagtctaagccatcggccggtcgaagtcaaaacagaggagactataggccgagaaaggccattccgaggccgcaggcgagaatcgtgaagccggcgacggcatggagatagcgttcaaggaatctcatcgggagcaagcggaggccggcggccggaagcaggaccatcatggccatggtcgcgatggtcgccaggctgaagacggcggccacgaggacgacgccgccggcgctctcccgggcggccggaaacatcagcagggggatcaagggctcgcaggggccgaagacgaagatcgtgaaaagaatccacggcgtcacgttcaccggcttcggttcggcgtggacatgtcccgcccggacgccgtccgttccttcggcggaggaatgatcgccgtggacggtgccgtcggtgtggacgtgaagatgatgatggccccgattcctcaagccccgggccaacccccagaggaaatagcccagtccgaagaggatgaacagcccggcggccacgccgccgcggacgccctcgaaaatctccagcttggccacgcccagcccgaacaggatgccgacggcgccgatcaggatggagctgccgacgtggcccaagccgcagagggccgtaacggccagagtcttcgccatggaccatttccgggccttggccaggacgataaacggaaggtaatgatcggggccggccgcggtgtgaagaacgccgagagtggcggccgtggagacgagggcggtcaatccgggcgtcatcgaggttttccgtggcacgaatcataccatctgtgccacaaaagatcaagggcgcgcggattccggaccgagagaggatcagcccggccggaattcctcccggcggacggtcgcccgggcgatccgggcggggacggggttgacgccgatccccggcccctcgggcacgcggatcgtccccggcccgctcaactcgatgaacggatcgatgatgtcttcccgataataacgccggctggccgagagatcatggggcagggagaaattcgggagggaggcgaggtgaaggttgtgggcccgcccgattcccgattcgagcatcccgccgcaccacaccgggacgccggccgaccggcaatggtcgtggatcgccctggcctcgacgacgccgccgacccggccgaccttgatattgatgatgcggcaggcgcccatctcgagagccgcccgggcggtcgccagcgagaggatgctttcatccaggcagagcggcgtgctcatcttcttttggagcttggcatgctcccagaggtcgtacggggcgtacggctgctcgacaagcaacagccggaattcgtccaaggcggcgagggcggccgcgtccccgggcccgtaggcgccgttggcatcgacttggagaaggatgccgggatggcgttcccggaccgcccggcaggcagccgcgtcccagcccggcttgatcttgatcttgatccggcgatatccctggccgagataggagccgacccggtcgaccagctccggcagggaatcctcgatgccgacgctgacgcccgcctcgatttccgtccgcgttcccccgtaaagcttcgccagcggcactccggccgctttcgcctgaagatcccagaaggccagctccaacccggccttggccatccggttgccccggtagatcgaggccgcccgttggaattctcccgggccggagatatttttcttgaaaacgagcggaacgagaaagtctttcaggacgtgccaggccgtctccgtcgtctcgccgctgtaaagggggctttcctcggccgtgcactcgccccagccggccagcccctcggcctcgaccttgatcaggatgaacgtccggtcataagaccggccgaagctggtctcgaaaaaatggacatagggcaggcgaagcaggaaaagctcgagacgctcgattttcatgagggccgtccaaagaagggcgctcgttccgttccggcggtcagccggaggacgtaataggagcgctcgccggagatgaaatcatccagacggtatcctcgggcaaagtaagcttcgaacgccttccgggcggctgtctgccaagcggcgaccaggccttcgccctggggcaaatccgcgattcttcccgggatttcgaccaggatccgcggcgcttgaagccggaggttcggccggcccgggacgatcgccggctcgaggccgccctcctccctctcgagcgctttcgggatccgccgcggatcgaccggggccggcggcccttgcctccgggccctcacccgggccgacttgatccgccattccacgaggaaccggtcgcttggaacgccctcctcgacgccgagcgtcggggtttccccgtagaaattccggagatacgtccgcccgacgactcccaggacatggatgttgagattggcgtttcgggcttgcagcggatcaaaggtccaggtgacgagctcaagcctccgtttcagggcttcgtcgcgctgagcccacttcaaggccttgccaaggcccaagccctggacctccgggagcacggccagatggtgggaatgatgacccctcgtccggccgaaatcggccgggaacgaatagacatagccggaaagccgcccggcgacgaacgcccccagaaggatcgccccggtatggaaggcgatttggaagaaatgatcggggatcaggtccaggtccggatggtcccagacccgccgctggataaaaacgcaatcccggaattcctccagcgacgtcaggggccggatgcggacatcaggcccggagattgattttttgggaggcggcgattttttcatagagatccacgatgcgtgaaaccatggcttcggccgagaatttccgccggacggactcaaagccttgagccccgagccgcccggccagatcccggtcgttggcgagtctgaggatcgtccgggccagcgtttcggggtcgcgcggggggatcaggattcccgtctccccgtcctcgacgacctcggggatgccgccgacgcgcgtggccaccaccggaagccgggcggccatcgcgtccatgatcgaagatcccaatccctcggcgtcggacgtgaggacgaacgcgtccagcgaggccaggaggcgcgggacgtcatcgcggaagccgaggaaaaagacgaggtctccgacgcccaacccgcgggcttgttcggccagccggagctcgagagccccgctgccgatgatgatgatcttgattttggggaggaacgttttcaggagcttggccgcctcgatcaaggtcccatggcccttgccgtccacgagctgggcgacgatcccgaccaggaagctgtccgggggaaagccgaactcgcgcctaaggtaatccctgtccaagctcccggcgaacggctcgaggtcgatgccggaggggatgacttcgatccggccggccggcacgccgccctccaggaggacgtcccggacacgctgggaaatggcgatgaccgcgtcagcctcggcgtatttgttccgggagaagcgattcgccttgaggggatattcgacccgccgggtgacgatccggacggggacgcgcgccaggcgggcggcccggccccccactccggcggcgtggccgtcgtggaaatgggccaggaggcaggactcgcggcgcatcgcccggccgattttccatccggcctggatgtgggcgtcgttcttgatctcgacggggaggacccggagaccggcctcagccgcctttttctcaagcgggctttcgggctgggcgacgaggaggaccgggtatccgcggccggcaagctcccgggtcagtaaaaacgcttggcgctggcctccgcgccaatcccgccccgcgtcaatctggaaaaggctcaatgcgctccccttttttccagatttcccggagcttggcgtaccggacaaaaatcccgtatccgttgagcacggcgatgacgagcccggcgaagccgtccaggaaaccccgccggagaaaataggacttgatgaaccgccccggggggacgaagatcagatggcggagacggcatttcctcctttgggcgtaaagcttctgggcgcccaggtcggagaactgattgatccgggccagatgatcggcgatgttgcggtacgtgaagtgaagaaggtcgccgtgaagcttgcggatctccccctcgacgaccaggtcctcgtggacatacgccccttcccagcgggcccggtccttccggaacagccggactttccggtcgggataccagccggaatgcttgatccagcggccgaggtaatacacccgccggggcaccgagaatcccgagcaatcggggtcgcccggaccgagggctttgatctcctcgcgcaattccggcgacagccgctcgtcggcgtcgagggagaggatccaaggatgggaggcgagtccgtcggcgtagtttttctggtcggagtaattcgtccacttccgctggaagatcctcgtcgtgaaccgccgggcgattttgacggtcaaatccgtcgagtcgctgtcgacgacgacgatctcggagacgacgccctccaggctccggagagcggcctcgatgttcgcctcttcattataagtgatcaccaccgccgagattttcacgccggaatcttaacacggcccgccgcggcggttcaagaacgcgcggagcggcggcgcccgcgattctggtatagtatcccctctcgaccgctcgataaggaccgttgtcatgaccgcctacgaacgcctgctggccaaagccttcgatcccgaggaattccgccgggaagggaagaaaatcgtcgatcttctggccgatttcctggccgcctcggagccggaaggccggagccgcgtgttcgcctgggaggatccggaatccatgttcgcctcctgggcggggcggttcgccgcaaaaccgtcgaggccgttcgccgatcttcttccggaaatcctcgatcgctccaacaaccttctccatccccgctacgtcggccatcagtgcaccacggccttgcctttggccgccctcggcgggctggccggccagttactcaacaacggcacggccatctacgaaatgggcccggtcaacgcggccatggaacggcatctcatccgctggatggccggattggccggattcgggcccggcgcggacggcgtcttcacgagcggcggatcgggcggcaacctgaccgcgctgctggccgcccggcaggccgcggccgaaggcgatatctggagggacggcgcggcgggcgcggctcccctggcgattctggcttcctcccaatgccattactccgtccggcggtcggccgcgatcatggggctgggcgaggaggcggtcgttcccgtcgatgtcgacgaaaaattccacatgaccgcctccggtttcaagacggccctggccgaggccgggaagcgcggccggagaccgttcgccctcgtcgccaacgcctgctcgacggccaccggcagctatgacgacctcgaacaggcggccgattgggcggcctccgccgggctttggcttcacgtcgacggggcccacggggccggagccctgctgtcgcccaagtatcgctcccttctccgcggcttggaacgagcggattcgtttatttgggacgcccacaagagcctcctgatgccggccctggtcaccgcggtcgttttccgcgacggcggacggtccttcgaggcgttttcccagaacgcctcctatctcttcgaaaaaaccgcgaccgaggaatggtacaacttcgcccaccggacgctggaatgcaccaagacgatgatggggatgcgcctgttcatctccctggccgcctatggcacggattttttcgccggatacgtcacggccgcctgggacttggcccgggagttcgcccggcggctccggaccgccggcgatttcgagacggcgtccgagcccgaaagcaacatcgtctgtttccggcacctgaagaaaggcgaaccggatttggacggcctccagcggcggatccggaggattctcctggagcaggggcggttctatgtcgtccaaacccagctcgacggccggacctggctgcgctgcacgctcattaatccgcggacgacggccggcgacctggacgcgctgatggaagagatccggtcggccgggcgttcctgaagctggatccctctccctccggaaaacggggacggaagcaccggtcgcgccggaccttgaatagcggcggcggcgaaaggacgagcggttttctcccgcgcggatatgataggatattcccgccatggcgggttcggatgaatcggtctttctttccgtggtcgtcccggcctataacgaggatgcgcgcctcgggccgaccctaaggacgatccgggctcaccttgaatccaggatcaacgccgccgggacggggaacggaccgacggaaatcatcgtcgtcgacgacggctcgaccgaccggacgggcgccgtcgccgccgaagccctccgcggccggccccgcgaccgggttctccgccgagggaaaaaccgcggcaagggtttctcggtcaaggaagggatgctcgcggccgccgggcgcttgatcctgttcaccgacgccgatctctccaccccgatcaccgaactcgaaaagctcctggccgggatcagggacggtcacgacatcgtcatcggctcccgagccctgcccggggcggagatccgccgtcgtcagcgtgttctccgcgagaggatggggaaaacgttcaaccttttcgtccgcggatgggttctcaagggattcccggacacccagtgcggtttcaagctcttccggcgggaggccgcccgagatattttttcccgcgtccgcctggacggcttcagcttcgacgtcgaagttctcttcctcgcccgccggctcggctattccatcgggcaggtcccggtcgtttggatcaactcgcccgaaagcaaggtccggatcgtcgcctcgtccgtttccatgctccgggatcttttccggatccggcgtcttcaccggaacgccgggttccggcgatcaagctgaatacgcagggaaggccggccggcggccgccgggacagaaccttatttcaccgcgggcgaggggcggagttccggccccgacggcccggggcgggagccgaaatcgtcctggcgggccgagcggcggtcgccagcgaagccgcgcccccgtccgaatccgcgggagcgcttccgctcctcccgggccctgagctcggcctcgaagccccggtcggaaacaaagagatccggcgtcgccgttttgatcggaatccgcatcccgatgtaggcctcgatttcggaaagcttgtcgccgtacttctcgcaggccagggaaaccgccttgccttccttgcccgcccggccggtccggccgatgcgatggacatagctttcgatgtcctcgggcaggtcatagttgacgaccatctccaggccctcgatgtgaaggccccgggcggccacgtccgtcgcgacgagaaacgggaaccggccggcggagaagtcgtcgatgatcctcagccgtttgttctggggcaggtcccccgtcagaaaacggcctcgataaccgttcttttcgagctttttggccagccgctcggcggcgtggcgggtgttggtgaagatcagggcgtttttcggcgcttcggccttgatgagccccaggagaaggttggccttgagatggctgccgacccgataaagctcctgggagatcgcctcgaccgtgatccgctcgggcgtcagctcgatgaacacgggatcgttgagaaattccaccgcggtccgccgggccagccggttcagggtcgcgctgaagaaaaggctctgccgccggccggccggcgggagcttccggacgatcctcttgatgtcgggaagaaatcccatatcgaacaggcggtcggcctcgtcgatcaccaggatacggacgtcgcccaggcgcagcgttcctttctcctcgaggtcgagaaggcggcccggcgtgccgatcaggatgtcggcccccttgcggaggacggcctcctgctgctcataaccgacgccgccgtaaaaacagccgatggtgaaaccgaggcgccggttcaacagatcggtttcgccctcgatctggacggccagctcccgggtcggggtgatgatcaaagttttcccgcttttccgggatccgtcccgcagcaggcggtcgaaaatcgtcaccaggaaggccgcggtctttcccgtgcccgtttgggactggacggccgcgtcacggccggcgagggtctcggccagcgtccgggtctggacgtcggttgtctcggtataccccctgtccgcgatcgcgcggaggagccggggatccaagctcagttcgtcaaaacgcattaaaaaatccttgagaattgaatttcaacataaggggggaagtcaagcggcgtatctcggaagttccttgaatcgactcgtttgcactaataccggccagatgttaaggaggaaatatacatgaaaacccccgccctggcaagagaaaattcagaaggaaaaatattgggattcggagaggcgccttgtgctaaattagaatcatgccccccggaaaaagctttcccctcctccttggagccgccttaacggcagcctttctggccgctcctcctccggccgccgcctccgtggagatccggatcggcggcggcggctggacgctcgcgcccttccatcccttgatcgaatcccgcagcaaggaggctgtccaagccgaattcaacgctttcctcgaggccgcgcttccccaaggaatgctttcgcccgtccgggcggacatcgacctggcctcctcgggcggctcgctgttcgcggagctttggcttccgctcggccggggccggttcgccctcggcgtccggggcgatgttttccgcttccggattcctttcaccgcctcggcctcggaaacgattcagcttatcggatttcccctcgcggagctgaacgggacggcggccgggacggtccggctcgagggtttgggactgtccctcctggggcggtggacggttgtatcggccggatcttttgaagtcgggctgcgggccgggatctcggttcttcccttccggggacgcctctcggccgacgggattctccaggcccggaccatcctgggaaatttcacgtacgccggcggcctggagggaacgatggccgaaatccgggaaggaggggccgacgtgccgtccctggtgctcgccccggccgccggcctcgaaacggccttccgccttgaccggcgctggaggatcttcgccgccctcaccgtttcccacggcacgttttattcagcgggtctttcgggttctttctgacttcggcttatgcccggccgtttcgggccgcgaaccaaagaccgggaggatccggctcaggacaaaagagcttcgatcgcggccaaaagctgattgaagtcgaccggcttttccaggcagatgaacggggcgagagaaagcgtccgcccgccgcatatttcttcctttggataaccggtgatgaacacgaaggggacggccccttccgcccggaggcgggcggcggtctcgaccccgtccatggatccggccaagtgattgtccatgatgatgacatcgaagcgctctcgtcccgcccaggcgagagcttcctcccccgtggccacgacctggacgcggccgcagccggcgtttttcaagcgggcgctcagatccatggcgatgagggcctcgtcctcggctaaaagaacggccggctcgcgcttcatgccccctcctccgcgaaaaaggctttggagggaaagcggatcaggcaagtcacgcctttttccgtctcgaaccggaccgcgccccggagttgatgctcgaccagcatgaccagagtctgtaacccgagcgtcgcttgggctaaaaggtcgaatcccggaggcacgccgcggccgttgtcggcgaaatcgagctcgatggtttttccgtcggtcgaccgggccaggcggatccggatttcgccccggccggagccggggaacgcatgcttatagacgttggaaaacagctcgttgaggatcatcccgcaggggatggcgacgtcgatcgggaccggcagctcctccagatccagcttcacctcgacggccgcggccgcctcggggtggctttccgccagctgggcggcgaggtcggaaacgtagtccttcagatcgatgcggtggagatctttcgactcgtatagcttccggtggaccagggccatcgcccggatcttgtcctcgatgtcccgaaaaacggccgcgatcctttcgtcgtcgatcgcccgggacttcagcgacagcatggccccgatgacattcatgttgttcttggtccggtgatagatttcccggaggagggtttccttctcccgcagggagcgctggatttcctcctcggcccttttgcgctcgccgatgtcctgaacgatcgcctggacgtggatccggttattcaggacaaggccgttcaagcagacctcggtctcgatcagcccgccgtcttttcttcggtgccgccagtaaaaccgttgcggcgcgccggcgaccgccgcggcgatataggcccgggccttttcgcgggaatcgcgcccgtcaggttgcgcgggaggagagaattcccagggcgaatggccgatcaggtcctccttggaggaacacccgtagagcctgaccgatcgatcgttgcagtcgatgaacatctcatcgatcatgaggagaatggcctcgtccgaggttccgaaaagcgtccggtatttctcctcgtcctcccggagcttgatttccagccgcttccgctcggtgacgtcctgaaggatcaccagaacccggaacggcgttttcccgcccccgcggaactcaggaacggcgtcgacgatgaggcggcggacgttcccggaccgggactggatcactcgaacccggacgcctcggacgggccggccggttcggagggcgaccttcgagggatgatcggcggggcggagcggaaggccgtcctctccggtcaagatccagcctggacgggacggatcaggggaaaggagttccttccgggcgcaccccagcattttcaaggccgcgggattggcgtcgatgacggcgtcgcgggcgtcccggtacacgacgccttgggtcaaggatttgaaaagaacgctgaattttttcccgcattccccgtccggcgccgaggcccctgcattcctcaggggaaccgtcttcctctccgaacggcgatccgcccggaggggcttcaaagaggcgctttttctcccctttaaggatggagcgccgccccggttccctttttttcacgccctcagggtaatcaggctccccgcgaaagtcaaggcagacggaccccgcgccggacgaggctcatccccgtggccttctccaggcgttcgacggacaggatgtagtcgatcttggccttgagctccaaggaccgggcattagccaggcggtcctggaaatccaggacgaagtagttcgtcgacatccctacggccagttttttctgctccgcctcgaggcttttttccgccagctcccgagccagacgataggcctcgatccgcttggcgtcggtctcgaccgctcggacggcgtcggcgacgtcaagggcgacctgccgctcgaggctcttcagcctggcttcgctctgggcgaggtcgatccgggcaacggccgcgtcggcccttgtcaaagcatggcccaggggaaaggagagcgtcaagccgacgctccaattgctgtaccggaaccgggccgcatccttcgtcgcgtctcccgcgcttcccggctccttcccgatgatgattccggtcatcgggttgtcgtcgaggtacttgatccggtcccccgaaatccccgggctcatgtaagagaattcgaaattcaaggcgggcagcatctggttccgggcgaattccaagctgagggatttattgtcgatggtcttgcggagggcctggagatcggtccggttcgcggcggcttgtttcaacgcctcgtccaggctcaaggagaccccttgcgcgaccgggcggtcgacgggctcgaggatcgtccccggagcttcggccggaagattcaggatcgttttcagcacctcgcgggagcgggtgaccatcgcttcggcctggatcaagtcggcttccctctgggcgacggccgcctcggcgttgaggatctcgatcggggccagctggccgaattcgacctccttcttgtttttggccaggaggtcgcggcccagctcgagcgactgccgcttgacctggaggctgtcgacggcgtaaacgaaattccaatacgcttcctggacgaggtaaatggtctccatcatcgccccgcggagctggacatcggcgatctcgaggctgttttcagcctccaggatctggcggcgggcgatcttgagcccgaaatccttgagaagcggctgactgaaggacacagccagcgtcgtcccgaagcgggggttgatcagctgaaaggattgattcgtctccgaccgatatccttggaaggagagcgaaaagcggccgccggtcgggatcatctgagcgatccccgcggaatagttccggtatttatcgatgctcgtcccttcgccctgcagccaccagtacgaggggctttcccggtgatcgtcgccgaagctgagatcgaattgaggcaggaaggtctcccgggccttgaaaagctgtccttccgccagctcgggattgtaggattcgacggcgatgtcgaggttgtttttaagcgcccgggcgatcgcttcgtccagggtcagcggccaaacggctccgtcttcagcggccagcggcccaaaagccgcgccgatcgttaacagagcgagaatgatccggcggatgttcacggcaaacctccctgagatccgggtcgcgccgtttccgtttcctccggaaagcgaggaaaggcggcggtccggccgtctcggattcatacggaaaaactgaggcggggttcagcggccgggctccggcggaggcgccggcgtcgtcccgatcgaaatcgaatagaccgccaggccgaggcggcgggtgtcgctgtttccgagcgtctcgtccgggacgaagaagggcgattcgatttcgatccggtaaaggcggtcgctgagaaaatcgaagcccgcttcgaagacggccgtccgccccttccgcccggccaggggccaagacgcggagacggcggggaaggcgccggcatcccggtcatacgccgacaccgccagccggagaggcgcatcgtcatcgaaatcggaccggaatgcgaggcggatcctccgggcggggaggcgggcgtagacatacgcccaaccctttccgtcggtccagcggccgcctacgccgtgcaatccgtcttcgcggggccagaagccgcggccgaacttgtcgaccgtttgttccgcccggtccggaaggagggtcgtttcgaagacgaaaagattgccccggcaccgacggcagagcgcctcggccatcgcatcgcggcggacggccgcccgccgttcggctcggagaacatcggccaccggcgttcggtcgatgtgacccaagtccatttccccttcataatccaggcagcagaggacgaaatttcctccggccaacaggcccaggttgccggtcatggggcaaggccgcggctcgaggcgctcctccacgtaggtgaaccgccccggggggaaagcggtctgaaggaacgtccgatcccgggtccagagctccagggatttgaacacgaggaagacgtcgggcaaggccatgtagccccagaagacctcgtccttcagccggtggaaaccggggggcaggccggcccggtccacggcgattttcgtcccgacatgatcccggtatttcaccgcggccgtctcccgggcggaagcgaaggaatcgggatatcttcttttcatccgcttggccaggcgttccagccgccggagcgtccgggcgatccaccgcccctcggctttttcatccgggaaattggcccagagcccggctccgccgtcggcctggatggtcgcgtcgcggctcatgacgtaattcgaggcgacatgcatttcgagccgggcgccgctgttcagccggaacttgtcctcgatgaccttccagagaatccgctcgtaagcccgaaacggcaggcggctgtatccccgcagggcatacgagcggggcgtggccgtctgaaagctcaaggccaaggtcaggttgccgtggcgaagcagctcccggcgaagggcgccgtcgcccaggagggtcatgttcgtgatgagggtgaccggatgcccggccgcctccaagtcgtccaggagcgggtaaaccttcttgttgaggagcggctcgcccaaaatgttgagaaggacggggggacggaggccgaggtcatggagctggccgaggaaactcttcaggcgggcttcggacaagtgctccttcggccggcggaggacatccgaagggcagaacgcgcaatgcatgttgcaggcgcttgtcagctcgaggaaaatcgtccccggcggatcggggatcgaggcggcccggtcgttcatggcggactcattatagactaaaatgccgtcgccggcttcggggcgcgttcttgacttgtccgtcggtccgacatacagtcttggcgatgaaaatcctccgccgcatcctccggcctatcgtctttttcgtcctgtcggcggggatcgcgctcattctccggctgaacgtccaggccccggatttcaccatccgcaaccacgccttccggcccgaagccggtcctctcctcgtgtccgccatcctgatcttcatccttctcgccgggctctgggccttgatcagccagatctggacgaaaaacagccggctgagctacaaggaagcgctggccctcgattttccgacctatctgccggcgctgttcttcctcctggctcccctggccttggtgcattacctgacccgggacgatctccgggaaaggcttggacttctggccgcgggcgtcctcctggccgtcctctatctcaaggctgtccgcgtcgcccaggccgaccgccaagggaaatcgaattggggggccgccctcgaccgttttctcgcctggcccacccggcgccgcctgatcctcttgtccgttctcgccctgctcctgatcaacggaggcgcgctcctcgtgagcggaaggggcgtgtccttcggcggcgacgagccccattaccttctgatcacccacagcttgctcaaggacggggatctggacctggcgaacaattacaaggaccgggacttcgaggcctacatgcccgagggcgtcgcgatgcgctcgcacacggtgcccgggaaaaagccggaaagccgctattccttccattcgcccgggatttcggttcttcttcttccgttttacgccctcggattggccctgggcaaaagcgccctggtctttctcgtccgtttcgccctgagtctcgtcggagtctttttcggaatccaggtttatctctatgcccggcaggcctgggcccgggaacgcctggcgttcgccctctgggccctggtcaccctctcggccccggtttttttctatgccttccacatctatccggagctggtcgtcgccgcggccggaatgtatgtgttccgccggctgcgcttcaaaccggcccgccgggccggagactgcgtcctgatcgggatcctgatcgtctcgttcgtctggtttcacgccctgaagtacgccttcatccaggcgcccctcttcctctacgcgatcctccggatctggaaaggaaatgatccggccgatcggggacgccgcctggccgccctgatcctcccggccggcgtcttcgcggccgcctatttcgccgtccagcacgccctctacggctcgctcaacccgacgtccgtctcctggcagggggccatggacgggaagcagacgctgagcttcctcaaggagctgttcaccggcatcccgttccgtttccgctgggagaccctggccggatatttcctcgaccagcgcgacggcctcctgctttattcgcctctctatctcttcgcttttctcggctgcgtctccctcttccggaaaaaagccggcgacgccggctggctgctcctcatcgccctgccctacatgctcgcctccgcgttcctgacgcagcggtcgggatacgcgccgcaggcccggccgctggtagccgtgatctgggttccggcgatcttcctcggcgcctttatcgccgagggccggaagcacgcgttccgttatctcttcaacggggcggccgggctgacgctcttgatgacctggcttctctgccgccacccgtacgccctctaccaggaaacgaccatgggcgtgaccgagcgggccggaagcttgttcatcaccctgagcaatctccacgtctatcttccccggctcctgccctccttcatcaaggtcgaggaaaccgggtggacgccgaacgccgtttggatcggcgccctggtcctcttcgttgtccttttcgccctccgccgcccgtccgacaagcgcctccccttcccgggacacgcggctgcggccctggtcctgctggccctattcttcgttcagtacgtttattatccccggcccgtcctgatgtcgccccggccgatcgtccacgcttccggcgagccctggacgttctattccctctcccgagtggcgatcatgaacgagcccgggcggttcgacattctccaagacaaccgggattatgatttctacttcacctcgaaccggcctctggaaaagctcggcgtggaattcggatcgccccacggcgactacgccctgcgactgaacatcgccgacgcggcgatcttttccgtgacgacgcgccgggaagtgatgacccgaacggtcgagtccccccccgcctatccctggaaaggccggttcctctaccgcgtttcgatccgcctggaaagaaaatcggatgtccggacggccgtcacgccctacctcttcgctttgagcccggcccgctgattccagccgcccggcggaggatcacgccccgggcttcggggcgggccccggcaactcgaacatcgggtaccggatccagccttttttgtgaagcttgaacttgacgagcatcctcaagatggaaaggccgtagtggatgctcccccagggcccgacctgggaggcctcggggaaatagcgcgtctcgatgggaatctcccggatccgcatcccggccagaacgccctgggcgatgatttcggaatcgaagacgaagccgtccgagttcgcccggaagtcgaccgcctcgagataccggcgggaatacgcccgcaagcccgagtggtattcggtcaggtacatgtaaaaggcgatgttctcgacggcggtcaggaagatgttggagaggtacttccatttcggcatgccgccctcgagcggccggccgccaagcatccgcgaaccgaagacggcgtcgcaggcgtcgtcgagcagcggctggacgagctgggggatgaccctcggatcgtattgatgatccggatggatcatgaccatgatctcgcccccgagcttcatggcctcggtgtagcaggttttctggtttccgccgtatcccgtgtttttttcatgaacgaaaacccggagccccaggcggcgggccaggtcgaccgtgccgtcgcggctgccgtcgtcgacgaggatgatgtcgtccacccaggaccggtcgatgtcgtcaagcgtccggatcaacgtcttttcggcgttgtacgccggcatgacgacgacgactcgctttcctcgtttcgcggttttcatgacgccttccggtccggaagtcgtcctcttatatcatttttccgcgtgtttgtcttgaagcggccgctcgtccgccccggattcgaggggacccgtcctcatcccccgccgtccggccggacctccggcggaccggccggggccccgatcaacgacttgaattcctccgccccgatcgtttcgacttccaggaggcgggcggcgacccgggccgcaacctcccgcttttcctcgatgaaagcgaccaccttgtcgtacctctgcttgatgatccgggtgatctcctcgtcgatatactgctgggtgaattcggagtactccctttggccgacgatcggctccccgggcaggaagatcgggcttctctgggacggcaggacgacgttggtgaatttttcgctcatgccgtagtcgctgatcatcttgcgggcgatgtcggtggcccgggcgatatcgttggaagcccccgtcgagatctcgccgaagaacacctgctcgctggcccgtccgccgaggagaacgtcgatcttccccagaagctcgtcctccgtcaggaggaaacggtcctcggtcggcagctgaatcgtgtatcccaaagccccgatcccccggggaatgatcgagaccttgtgaacgggatcggcgcccttggcgtaggcggccaccagggcatgcccggtttcgtgatgggcgacgatcgaccgctccttgggattgagcaggcggttctttttttccagcccggcgacgatgcgctcgatggcctcgtcgaaatcccgctgcaggacgctggcccgccccgcccggacggccaagagggccgcctcgttgacgatgttggccagatccgccccggtgaagcccggggttccccgggcgattttgtccaggtcgacggacggatcgagcttcacgttccggatgtggactttcaggatgtccacccggcccttcaggtcgggccggtcgaccagcacctggcggtcgaagcgcccggggcggaggagggcgggatcgaggatttcgggccggttggtcgccgagagaataatgacgccggaccgggagtcgaacccgtccatttcgacaaggagctggttcagggtctgctcgcgctcgtcgtttccgccgagagtgatcccgcggctcttgccgatggcgtccagctcgtcgataaagacgagacagggcgctttctcccgggcctgcttgaacaggtcgcggacccgggccgccccgacgccgacaaacatctcgacgaattcggccccgctgatccggaagaacggaacctgggattcccccgcgacggccttggccaagagggtttttcccgtcccgggcggaccgaccagcaggacgcccttggggatgcggcctccgatcgcctcgtacttccgcggattcttgaggaaatcgacgacctcgaccagctcggccttggcttcgtccacgccggcgacgtccttgaaggtgacgcccgtgtctccttcggccaccagcttggccttgttcgccccgaaggacatcacgccctggcccgcgccgccgattctcttgctgagataattccagaagaaaaccatcaagacgatggggaacacccaggagaggagggcgctcagccaggatctgttctccggggcgaccgcgtaataatcgacgcctttttcatccatgagagaaacgagatccgcatcggccatcaggacggcccggtaggttatcgaagccgcagccggggccggctcgccgggctcgggtttcccgggagccgtctccggggccggcttccgggtgaatcccgtcacgtatttttcgctgatttcgacccggacgatctcccccgatttgatgcgagccttgaaatcgctgtaatcgatggattcgtacttcggccgcaggagcacggtgttgatcaggaaaagggcaaccagggtgaacaggaaataccagatggaaaatttaaactgcttgcggtccaggggtttgaagaggggatcgttcttcttgagccccggatcttctttgttctttccgttgcgggcctgcagaatttccttcttctcgtcgttggcggccatgccgtcctcctccctttcttgcgggtcgagcccgccgccggagcttccgccaggcgcggggaagcgtcccggtttctccgtctccccggcgccgggccgggaatccatgatactccggagggggaggcgacttcaatgcgtcgtcggcgaaggcccggtcggccggatggaatttcccgcgggctcgcccgacgggtccgcgatccgctcgaaaagcgtctccaaattcagcgtcagcccgttctcccgcccctcaagaaaggcgatgaagcgggatcccccctcgtaaaaagccacccgggtcaaggggagagccaagccgccgtggttctcctccatgttcagatgccggagtatcgcattctccaagtaccgggcgaagccttctttccactcctgccagcaaaggtactcgtagttttcgggtccgaggaggtccttcagccgagcccggatccggagagcctccgggccgtcgccccggtccatccggtccaaggcggcgggatagtcttcggcgaactccgcgttttcgtaggggaacgggtagctcagctcccacatataatcgcccgcctccatggcctggcgatagatggaaagccgtcccttcaaggccggctcgacggtctcccactggcggcaatggacgaactcgtggaagatcgtcacatacccgcgggcggaatcgaagacctccgggcttaccacgcaggcgctccggttgtcgagggcttcaaggggaaacgccgcccggacgcctttcggcatgggcatggggacgggcgcctccttgaggaagcgatatccggttttcgattcatccagatcaaagatcaggaaacggtcgccgtcgacgacggccacgggataaaggttttggagaacggggtgaaggggaccgacctccgcttgaagcccgatgatccgttgaagcttgggcgccaggctttccttcaaatcttcggcgacggccgaagcggccaaggcgatcacggccgcgacggccgcggcggtcatttttctcatttcttcgctccttggggcgcgtccggatcgctccgtcggcgatattcatccggcccgtctatgatccggcgcgcgacgattcccgttaacgccgctcattttgatccaatcccggaacaaccgcaacccgcggccggtttcggcgacgaggcgttccttaatgtcaacgatagacagccgggaaaagttctctttcgtccgcggacgccggccggccgcaaaaagggaacggccggaaacctcgaaagcaggccttccgtcccccggcctcgggcgcggctccggcttgatggattcctacgtcttcttgacaccgccggacaagtcgattattactgccttcatgacggccgtcccggaatccgcggtttcccgcccggttctatgggcctcggccgcggggctggccgcttatggaacggcctggttccgggcggccggggcgacggtattcgatcacggattccggccggtaggaatcaccgcggccttgttcctggggctcgcggccgcggccctcattctcctctcccgggccgcccggtcttggcaggacgaggcgttcggattcggagggccgttatggcccccggccgttcttctcgccgctcccttcctgaccatcgattatttcgaccgggacgaccttcagaggcggctccttcttctcggtctgctcgccgccgcggcgatcgtctacctgggcgtcgccggatccgcttcccgcccggaatcgccgcgggcgacccgtctccttgacggatttctccgcctgccggtcaagcgccggcttcttgtccttttcctgaccgcttttctcgtctacaacgcctgcgccctcgtcctcgtttcgcgggggatgaccttttcgggcgacgagccgaactaccttctgacgacccacagcctcttggccgaccgggacatcaatctcgaaaacaactaccgcaaccgcgattacttccatttctacgacgagaaggagaatccgaatctgcggatgaatccctacgcccgggcgggggtcaaaggccgcggatatatctacccgatcaacctgcccggcatctccttcctgatggtccccttctacgccgccgggcaggccgttcacggcttcgcccgaacctttctcctcaagggaagcctggcggtctgggcggcgcttctcggcctccagatctacctcctcgccaggaagctctggaagcgggaagggctggccctgggtctttgggcgctcgtttccttcaccccgcccgttcttttctacgccgtccatctctaccccgagatcccgatcgccctgttttcggtctatatctaccggatgacccggtctgggcggccgatgtccgccctccggctggcccttctcggcgctctcctcggatcatttttctggttcggcctgaagtacaacatgattttttggccgcttctcatcgtggccgtcctctccctccggccggcggttcgtccccggagccggattttgtggttcgtgatcccggccctggccggcctggccctcttctatttcgccgtctggaacatgtacggaacgttctctccgttcgccgtttacgagggcgtcctcgagccggggcaggcccgggagatcgcccgttccttcctcgatctgccgttatcggcccggatcgagaccttgctcgattattttttggaccagcgcgacgggctcctgccgtacgcgccgttctgggcgttcttcttcctgggcttggtcgagatggcccggcgcggccggaaaacgggggccgagcttttcggcctgctgtttatcgccgggccgtaccttctcaattacgcctttttcactcatcggcagggattctgtccgcaaggccgggttctcgccccggtttcctgggtcgcggccgcggccctcggctgttttttggagcgccggggaaatcgtttcttcacctggttgttcggtctcggggtcgcggtcacggccgccatgtccctgatcctcctcggtcatccggattatctttaccagccgacgactcacgacttcacggcccgggccggcgaccttttcgtccacctgggcaatgtccgcttgttcctgccgcctttcctgccttcctttgttaaagtcgacaattcggcctatctccccaattacatctggacggggctgctcctcctgttcatcgccgcctacgcggtcttcgccaagggcggcggaaagccgctgccccggctctttcccccggccgcggcggccgtcctgctcgccggcgggctcggactctgggttcttttcccgcgcgtcccccttcatccgtcccggacggtggtctattccaccggcggaaccctgggtttctacctgaagccgatgggacggggcgtcgttgccaagaaggaaggcgagatgtacctccattttgaaaagtcctaccggttcgtcttcgcctcccgggagaagctcgggaagatccgcctggcctacggctcgaggaaaggcgaacacgaaatccggatgacgtgtttcgacactcccctgctggaagacgtcacggccgaggaaatcaaggaaaccgtcttcgccccgcgggcagaataccgcctccgggatctttacctttacgagatcggcctgacgctgaaaaaacacagcggggaaaaccttctcgttgatccctatcttctcaaaatcacccctctccggtgacgaggcaacgcccgaggaaagccggggatgaaaactccccgccctcaacgcggcgagcggggataagcgtcaagatccaggcggagggggatctttttccttgacgctcgtattttcgcccaggccaaggcgccgaccatcgccgcgttgtccgtgcaaagcttgggcgaggggatgccgaagggcaatccgcgcccggaggcgaaccgctcaaaagcggcccggaggcggcggttgcgggcgacgccgccgcaaagaacgagggatcgcgggacgaagcttttgacggcccgctcgacgttgcggacgagggtccgggccacggcgttctcgaagctggccaggaaatcgggcagggcggccgcctcccggctgattccgctttcccggatgatccggacggcggccgtcttcaatccgctgaagctgaaatccaggctccggtcgctcatccgcggcagggcgaacgggaagcggccgggatcgccgttttccgccagcttttgaatgagagggccgcccgggtatcccagctccaggaacttggcgaccttgtccagggcctcgccggccgcgtcgtcccgggtccggccgagaagacgggcgcggagcttccggggcatcaggaaaagcgccgtgtggccgcccgagacgatcaaggcgaggacggggaagggaagatccggacggtcgaggaaggcgctttcgatatgggcctggacgtgatcgatccccaggacgggcttccggtggtaataggccaggcccttggcgaaggaaagcccgacgagcagcgagccgatcaggcccggtccctgggtgacggcgaagaaatccatagcctcgagcggcaagccggcggccgtcaggctctcccggacgacaggggtgatggatttcagatgttgacgggaggccagttccggaacgacgcctccgtacggggcgtgaacctcatcctgcgaaaggacgatgttgctgaggatcgtcccgtcctccccgaaaacggaggcggaggtctcgtcgcacgaggattcgatcgccaggagatgccgcatcgcctttccggtcatttccggcggagggcctcgaggcttgcttcatagggcgggcgggccacgccgttctcggtgacgatcccggcgatgtagcgggccggagtgacgtcgaacgcgggattgcggacccgggccgaaggcgggacgatgagccgcccgttgatctcccggacctcggccgccggccgctcctcgatggggatgaggctcccgtcggccagcgaaaaatcgaacgtgctgagcggggcggcgacataaaacggaaggttgttctcccggcagaggacgcccacggagtatgtcccgatcttgttggccgcgtcgccgttgcgggcgatgcggtcggctccgacgacagccgccgagatttcccctcgatgcatgagccagccggccatgttgtcggtgatgacccggtaggggacgccgatccgctccagctcccaggccgtcaggcgcgcgccctggagaaacggccgcgtctcgtcggcaaagacggtgaatttccggccggcttcccaggccgcccggatgaccccgacggcggtgccgtagccggccgtcgccaggccgccggcgttgcagtgggtcaggaccgcctcgccgtccttgatcagcggggcgccgtgggctccgatccggcggcacagctcctcgtcctcgcggtcgatctcgaccgcttcggctgcaagcttcgcctggagcgaagccagcggctcgccgcgatgggcttcgaagacggatttcatccgctccagggcccagaaaagattgcgggcggtcgggcgggtccggtgaatccggtcgtggacgcgggcgaaggccgcgtcccagttctcccctttcttgaccgcccgcatcccgagggcgacccccatggccgcggccactccgatggccggagcgccccggatgaccatggtttcgatggcctcggccgtctcctcataagtgcggcattcgacgtaggtttcctccagcgggagcttccgctggtcgatcatgatgatcctgtcgccggcccactcgatcgtcggacgcatgagtactccttgggaacgccccccagtataacgttttcctccccccggggaaaccggagggcggctggtcagaacacggtcttgacccgaaccccgcgggcccggagctcccgggccagggcccctccctggcggcggaaaaacgcgtccgataaatattcgagcaggccatgacgggcatagaaggcccggacggccggctggtagttcatccggtcgatgaacacgtgctcgacggccggggccaggagagaggccagcgtctcgggatttccgggcagaagcggcccggcgaaggcgtaggtccggacgccggcggctttgaattcccgcaggatctcgatccgctcgcggaccggggcggcccggggctcgaacagccgggccgcggcctcgtcctcggtggcgacggagaacccggcttcgacgtccttgatccgccggatgatgtcgaggtcgcggcggaggagggctgacttggtttgaatcacgacgggaaaacccttcccgccgaggatttccaggaggcgccgggtcaagccgaatttcttctcgagcggctggtacggatcgcagaccgaggcgatccagatcgtcccccgtttggccttggcgatttgccgctccagaagaagaggggcgttggtcttgacgtcgacgaaccctccccacggctcgacgtgcccgctgtaccgccgcatgaacaaggcggcgtaacagtagacgcaggcgacctggcagccggtgtagggattgaggcagtagtcgtagatcttcgaggcgttcaggatcgacttggcttcgatttcgcggacgacgggaaccggagcgggcgccttttctcgcatgttctcccgctccagcataacgattctctctccgccgcggccatccttgatccgcggccgggcggctgaccgccggccctacttgacttccaggatggccaggaaggcttcctggggaatgttcacccggccgacggtccgcatccgcttcttgccggccctctgcttttccaggaccttcatcttccgcgaatagtcgccgccgtaaagcttggccaggacgtccttgcggaaggccttgatcgtctcccgggcgatgacccggctgcccagggcggcttgcagggcgacctcgtactgctggcgcgggatcgccttgcgcatccgctcgaccagggcccggccgaaggtgtacgccttgtcctcgtggacgatcaccgaaagctcgtcgacctgttcgcggttgatcaggatgtcgagcttgaccaaggggccctcccgccagccggccagctcgtaatcgagggaggcatatccctgggaggccgatttgagctggttgaagaaatcgaagacgacctcgttgagcgggagaaggtattggaggaggacgcgatggggactgatgaattcgagcttcttctgctcgccccgccgcccctcgagaagggccaggatcgccccaaggtatcggtcgggcgtgaggatcatggcctcgatgaccggttcggaaatggagacgatgtcctggggccggggcagctgggacggcgtccggatgtcgagggtttcgccggaccggaccttcacccggtagctgacgctgggagcggtcgtcaggagggtcaggccgaactcccgttccaggcgttcctggacgatctcccgatggagaagcccgaggaatccgcaccggtaaccctggcccagggcttgcgaggactccggctcgtaaaaaaacgaggcatcgttgaggcgcagcttctcgagggcctcgcggaggtcctcgacgcgggtctcggccgcaggaaagagcccgcaaaaaaccgtcggcttcgcttccttgaatccggacagggcggctgaggccgggcggtgcgtgtgggtgatcgtgtcgccgatccgggcgtggctcatcgtcttgatgccggcgatcagataccccacttcgcccggcgacagggcctcccgcttcaccggatccggcgtgagataaccgatttcctcaacttcgtaatcggcttgcaggcccatcagcatgatcgcgtccccggtccggatcgttccgtcgacgacccggacgaggacgacgacgccccggtagttgtcgtaccaggaatcaaacagcagggccttgagcggagcgtccggatcccctttcggcggaggaatccgggcgacgaccgcttcgaggatctccttcacatttttgccggtcttggcgctggtgagaagagcttcatcccggctcaagccgacgatatgctcgagctggtcgagggcggactccgggtcggccgagacgaggtcgattttattgatgaccgggatcaagtgaaggtcgttttgcacggccaggtaggtattcgccagcgtttgggcttccacgccctgggaggcgtcgatgacgagaagggcgccctcgcaggcggccaggctgcgagagacctcataggaaaaatcgacgtgacccggggtgtcgatgaggttcaagacgtacggccggccgtcggcggccgtgtattccagccgggcggtccgggccttgatggtgatcccccgctcccgctccagctccatggtgtcgagcgtctgggctcgcagatggcgggcggcgaccgccccggtcacttcgagaaagcggtcggccagggtggatttgccgtggtcgacgtgggcgatgatggagaagttgcgtatggagttcatgggaaacattcatcttcgcaaaaaaacggcgttaggtcaatgagaccggggattccaagccgccgggccttatgtcccgtcgggggggaaggaacccggagattccggctgttccggacgcgggctcggccgccggaagccccttattcgtccgcgaacggccggtcgatcgccaaggcttccatcccgcccaggcagcgggcgccgtcctccgtggcgaccatgctgtcctcgtgccggatgccgaattccccggcgatatagattccgggctcgttgctgaacgtcatccccggctcgatccggagtttatttccccggaccaggtagggatactcgtggccttccaggccgatgccgtggccgaggcggtgggcgaaatacgcgtagtccgggccgaacccggcgtcctcgatgaccttgcgggcggccgcgtcgacgtcctcgcaggcggcccccggccggcaagcccggaaggccgcggtttgagcctttttcacgatgtcccagatccggatcattttatccgagggtttgccgaagacgatcgtccgggtgacatcggagcggtatccttccacgctgcagcctccgtcgaccatgacggccatcccgtcggtcagtgtcctcggcgcccgcgagccgtggggaaaggacgtccccgggccgaattgggggccgccgcctccggtcgctcccatcgcggcgtgggcttctccgatcagacccgccaggtcgcggggagtcatgccctccgacaaccggccgaaggctttccggtaggcgagcttggtgatccgggcggccagatccatataagcgatttccttggccgatttggttccccggcagccctccgtcaccgatgccgcgtcggccggctcgatccaggaagcgtctcgattcaagccgtacacctggaaggcggcggtgttcggagagaggccgaggcgccggccgccgaggtccttcagaattcctccgatcaaggcgtacgggctctcatgttccttccaggtccggatctcttgtccggagggaatcgtttccttggcccggtccaattcgaaggccgggcagacccagatcggggcgccttttttattcaacatcgctccgaaggtccgctcgctcgtccaccagctcaccgaggtgaaataagccaggttcgcccccccggacaagaaaacggcatccagcccgccgtcagccatccgccgggcggcgcgttcccgccgctcttcatagtccgccgggtcgagcggccggaccccggcggtaagattcccgacctcgtcgccggcccccgccggggaggcgaacaatccgcggacgaaggccgggagggagagagtcaagccgccgatctttaaaaattctcgccggggaatcatcgggatctcctggggaatggaatgagcgtccggatcatgacggcgtatcgtctcaccgggagggatcgatgtcaaacgcgcgaccccgccgggactgacgaagacgcgtttcattgacttttcgagctctctcgagtactttcatagcgtcattcaaggaggccggcatgtttctgttcggcacggtcggaccgcaagagttgctgatcgtcctgttgatcgtcatcatcatcttcggggcgaaaaagctgcccgatctcggcaaatcgctcggcgaaagcatccggaatttcaagagctccgtctcgggaaagggaaaagaagccgggaaggacgagtcgaaagacaaaatcccgccggccgactgatccgcctttccgatgctccggacgatcgagatgctggccgcgcggcggcgcgcggccgaggatgatttccggcggacgctcgccgagctccgccgcatatccgaaagcctggatccgttggtccggcggctttccgccccggccgaatcgtccggagagatccggtccgccgtggccgaagccgccgccgccttgaaagccctggccgaggtggccgcccggcaggccgaggccctggacgtcctttccgacatccgcgacaagctgtgggacgccgagggcaacaaccacgtcgggatgattttcaagagcatggagtggcgggtcgaccgcctcgcgatcgccgccgaggacgccgccgtccttcttaaaacattcgcctccctccaggacgagctccatcggctgctggccgccgtccaagacaagaatctgtccacgcccgccttgatcgccccgctgatcgaaccgctcgaggaggggcgctacctgcggttcgaaaaccgcttccgcggggccgaggaggaaatccggaagcagcagatcgcctatctcgacgactttccgccgggcgggcggattctcgacctcgggtgcgggcggggggagttcctcgagcttttgaccgcccggggcttccaagccgagggcgtcgacctcaacgtcgagatgatcgcgctctgccgggacaagggcttgtccgtcgagaaaggcgatcttctcgaatgcctggccgcccggcccgacgcctccctagacgggatcttctcctcccaggtcatcgaacacctgccgccggcctcgcttcgccggctggtcgagctgtcctatgccaagctccgcccggagggacggattctcctggaaaccgtcaaccccctgtccgtcttcgcccttgtccacatctatttcctcgatttcacccaccggaccccggtccacccccaagcccttcagttccttctggaagccgccggcttttcttccgcggcggtccggttcggtctcgggctggaggcggaaaagctcggccatattccccccgcggacgaggccgcggccgtcttcaatcgcaacgtcgatcgcctcaacgctctgttgttcgctccgccgcagtattccgtcctcggccgcaagacctaagaccggcggtcatccgggcggaagcggtcttatttcaaaacacggcctctttttcgcaaaagaaagcatcaaaaacgcccgttctctcgtatcagagatggcggaccggagcgccggatccgccggatttgcattcaaagaggatgttctttaaaattgggctcttgcagaatcacgaaaggcgagatccgatgacaaaacgaatctttgcgacaggaatgctcttcctcgccctgggggcggcggccgcggcggccggtcccacggtacaggaaaccgggacgatgttcggccgggtcaccgacctggacggcaatccgcttccgggagcttccgtgtccctcatgggcccgtctctgatgggcatgaacagcagcgtcacctcggccaccggccagttcttctttcctcttctcgccccgggcctgtacgaaatccgggtcgagatgcccggctttaagatgcagatccagagggggcttcgagtccagtccggacggacgatgcagatccatgccctcctggaggaaacggccgtggacgaggaagtcaccgtcccgccgggcgatcagcgcgcggacacgaggaacgtcaaaagctcctcagccctgggctcggacaccctggcccggcttcccctgccccgcgatcatttccttccgtggaccttggtccccggggcggtggccgatgtcgcccgggaccgccgtctcgtcgccgttgagggcgccgcgccccggagccagatcgtcctctgggaaggcgcgatgttgaacgaccccgtttcgggactgccactgatccacccggtcgacgacgccgtcgaggaaatcgaatacgcgacgacgggacttccggcctcccttccggcgacggacggggcctacctccagatcgtcggcaaagacggcggcaacgactttcacggcgggctgtcctattattccacgggagcagccctggcccaagatctcgacgcgtcctccgccggctcgctccggccggccacgcccgaccgatacgaaagctaccgggatctgtccttccatctcagcggatcgttcatggacgaccgggcctggatgtttctggccggccgaaggctgacctcgacggtctccaatccgtactctccggaaacgcggatggccgctcttggattcaccgacagcccggccttcgacctggcccgcaaggaatggagcgggtacgccaagatccatgtccggccgacgaacgaggtctcctattccggactccttctcttcaacaacttcaccgaaccctacgacacggtctcggtttccgccgggacttcctccgaccgcgttcccgagcggagccccgagaacgtcctcgtcaccacccacaatatccgtttttccatccgccagaacacggcggctgagttccaagcccattacattcaccacggcttcaccttggcctcccggggatcgaccggagcggcggccgtttatgacgcggtccaggatgtgtggtggggcgccccggcccgcgagggaacggaaaaaagcgaggcgttcggcgtttccgccgccttgacgcatttcaaggaagacgtcttcggggcggatcacgacctgaaaatcggattttcctacgatcaagccgagacgcataacgactggtatcgggccaatccgttcaatacgtattggttcgattacaagacgaaaaacccttattattacgacggcctgtcgctcggccgcctggaagttcttccggcgccggcggccgccgcgtcctgggacgtctcggagatgacccgcaagctcggagcttatgtccaggacacgctgacccgaaaacgcctggccctcaacgtcgggattcgggctgactttcagattctctcccttccccttcaagggcggaacctgacgagcccggcctatgctcctgcgtttttcaacaccgccctggatttgaaggatttcatgaaggcgatcgacggcctcatcgacgaggccggggtgacatctccgctctcctccatcaccaccctggagcgcacctcggtttcatttttcaccctctccccgcgggccggtctcatcgtcgacctgctcgggaacggccgggccgccctgaaattctctttcgcccgctctcatgagcccttgtggatctcgggctacgacgaggaccagttcctcgagccgcagacgctcaccttgatctggcacgatttcaactccaaccggctgatggatatgccgggcacggatgactacacccttctgtcctggcgcctgcagaatctcgattccgtttattacgacggcgtcaaggctccccggaccgacgaattcacggccgggctggagtacggtcccgcctcgaacctgcggttggggctcaagctcacctatcgtaaaacgacccgcctcgtcgaaaacatcgattcggtcaacggatccgatccgctggcgacggatgcgatcgggcggatctggctgccgatgacggtcaccgatccgggcgccgacgccctattcggcacggccgacgacgcctccctcaccgtttacggcctccgggccgaccggccggctcccgtctgggtcgcggccaatcccgaggacgcctaccggaaatacctgggggcgacgctgacgctggaaaagaggatggccgacaactggcagctgcagggatccttcaccctcagttcgcttcggggaacggccgattacgcccttcccggccggatcaaccggacgtttctattcaacgatcccaacgccctgatcaacaccgaggggccgctggcctttgaccggcccgtccagttccggctctcgggaacctacctgttccccttcggccttaccttcagcgccttctttcagtactattccggcgccccgtgggcccggaccctgacggtgtatttccccgccggttacatgggttatggaacgcgggaaccctcggtcacggtgtacgccgagccctgggggacaaaccgggcgccgggcgtcgcctgcctcgatctccacctggagaaacgattcaccctgaaaaagggcgcctcgctgaccctgatggtggacgtcttcaacacgaccggccggaacacgcagacgatttcccaggaccgagccggcatcctcgacgaacgcaagacgccggcgcgttacacggtcacgcaggacgagcagatggtgaatctttacggagtccgccagttccgggtggggatcaagttcgggatttaaaggcggtcatttccactcgacggatttctcgacgtcctccgatcccgtttggttggtcagcttcacctcgaccgtcggcgtcccggcggcgagacgggccagggcgtcctcctggatgacgtagatcgggatctcgatgacatgaacatccccgtcccgcttgtggatttccgtttcgtcgtaattcgcctcggccgagaaggttttctcccaaaccgtctttttctcctcatcccggacccggacgaaaaccgtaaaggtcgtgaggaatcttcccccctcggatttgaaccagatcagccggaaggggatttcgagccggagcatgccttccatccggtccgcccggcggaccgtggaccggagctccgcggaaaaatcgaggaccgcccgggctccgcgggtacggctgaccggctgggccggacgtcttcccggttcccccggccggctgccgtccggcccgagcggcgcgggcggctggttgaggcttaattccttgagcggcgccaggtcgaacgtcacttgacggaaattccccgtgcacatttcgtcgagaaactggatcgggaatcccttgtagtaccagatttccaggcagtttctccccgaggtctcggcaagcatcggaaccctcttctcatcgggagggccgtagaggacataaatccggccccggtccgtcagccagcccttgacggcgtccctccggaacatttcattggcctgggcgatccgggcgtaatactcggaccggacttcgttgtcggacgtatcgggatccggatcgcgccgggcccagaaatcctcgatgaacgcgtccttcccggaatcgggcgtggacaggaacgttttcctctcggcattagtgatcaagtagcggacttcgctgagaaactcggcgtatttctccggcagctcccgctccatctggtaaagcgcgcagccggccgatccgaggacggtcagggccagggcggcccacgcggcgatcgccgggaggacggggacttttttcatgatcgactcctgtccggaatcttattttgaacgtccgggaaatgcaaatcgttccaccaacgggcgggattcagcctttgcagatctccgacgcccggcggtaatatttggcgatataattctcctggtagccgtaggaccagtggacgtcccggatgtgggcggccgcctcatcctttttcccggcttgtaacagctcgagaaaggcttcgtgctccccgatcgaggccacctcccactccttgacgaatccttgctggcggggaaaatcgtacaaccgccttttcaggttgttgacgatcttcaggaggccgtcgttgccgcaccgggagagaaacatatcatgaaaggagaggttccgttcataatagaggtcgaagtcgtcccttccgatcgcctccttcatttccgcgttgagacgagccatctcctccaactcgggcttccccaggaggccgaacgcctgccgcaaggccgtgctttccaacgccccgatgatctcatagtaattcttgatgtcctccaagcgaaggacgttgaccacgaccttccgccgcggcaaaatcgtcacaaatccttccatctccagctggagaagggcgtcgcggagaggagttttgctgacccccaggcggagggaggtctcctccatgtcgatgaccgagccgggaaggatttcgccgcggcgcattgcctcccgcaaaaactcatagacctgttccttcaacgatttgaggttgagcaacggtttcgtcttcacgcgttctttcccctcagcatgtgaaatttcacgcctccggcgccgctcaactataggactccgtctgttttaagtcaatgggctccatctccgggcggcgggcggcgagagcttccagctttttccgaagctcgggctggccgggattcagggccagcgacttctcccaagccgcccgggcctcaacccggcggttcaggccgagataaccgtccccgacgaggttcagaagccggggatgaatcccgaacaatgtcatcgcccggtccagaacgccgaccgcgccggcgaaatccccgccccgcagccgcgtctcggcggccaggatccagatatcatacgccgtctccgctcccgccgcgagatagggatcgaggatgaaagcggcggccgcgtattcgccggcccgatcataaacccgggcaagggccaaggcgatctccggcccggccgtccccccggccgcggctttttccaggaacggccgcgcctcggccgcccggccggcggcctcgagctgccgtcccaggagtccgtcgtaagccggatcgccgtcggccggcatcagcttggcgtgaatccacggccgggggaccgcttccagcggcgtgacggcgaaatccccgcccccggcggccgcttcccgcccgtcgatgaaaagccggacccgggcggcgtagaaggccgggctcaagccggaggccggcctcgattcaacaatgtccgaaacgccggaaaagccggaaagatcccgctcccattcctcgattgcaacgtcgtcccgggtgatggagaaccgaaggcgggcccggcttctgaccgggccgtcgaggccgagaacttggaaagccaggaccaggtcgtccgaacgggcgagggttcggccggattgaaaataaacctgggttgagccgaaccggaacggcttgagattcgagggttccacgtccgacgatcgggcccgatagccgagaagcggggcggtgagaccgggtccggagccggattcggggacgaccaccgtccgctcgaacgtgcaaaattccttggaagcctcattcctgagcagcagggagaccttgaagattcccgggatcaaggggaagagatcctggatcatgaacggcacgcggctcagcgtgtttttccgctcttcgtccatccggacggaaacgattttttcgaaggtggaaataacccggccgtcctccagcgaaacggctccgttgaggcggagcgtagcggcgtattcccggccggcggcagcgagggaaagacgggccggctcgagggcgtaatggacaaaggcggttccggaaggctcgcgccggacgatcatcgtcccccggctgtccaggtaattggcgctgtattcgacctcgacgatatccttgtattcgaggaactttgccgcgtattcatcgtcgatccggccggcgccggaagccgcgattctttggagaagaatgtcggaggacggggacggacgccccggaaaaccggacgcttcgccgggaatcagggaaacggagaccgcggccaagcccgcgtcgagagcggacaaggcccgataagccttctcataatccccgggatccccccggaaatcggagaggagagccgccggtccgtcctggaatgggctgtagatcttgaagtcgccgacagacccttcttgaaaaaagaccaagttgaacgacggcggcaagcccgccgatcccgcgttctccttgttccggtagaaccagacctcggcctcgcggaggccgtccttgccggaatatcggacgatgtcgtccggctcgccgaggaggacgaacatgcgcccgcggtcggttttccggccgggccgagccgccgtccggccgaaacgcgcgtcggcgtcagcaagccggcgctcgtgttcggccttgaattcgttttccggggtcgccggaacgggatcgcggcgcttccagaaggcggcgatgaaaaggtcccgctgccggtcggattcgagccggaggaaaacgtcccgctcgcgggacgataggatgccgtcgacatcctcctcgagccatttccggtgggcgggggacagctccgatccggacggccgggcgggcccggccgggacgaggaaaagacaagccgccagcatcacgatcaccgggcgggcggcggccgagcggcgcatcatagttatcaacctggattttattttacaacaatagaggggacgcctcaccccccttgacgcacggaaggggttgagcaaggcggctcctttctctatcatatccggaggagggattcaatgatcgagcttcagggcgtgtcaaaaagctataacagcggccgggtgaaagccgtcgacgatctcaccctaaccgtccagccgggggagatcttcggtttcctcgggccgaacggagccggcaagacgacgaccatcaagttgatcgtcggtcttctcctgccggatgccgggaccatccgggtcgacgggatcgacatccggaaggacccgatcgcggccaagtcggtgacgacgtacgtcccggacacgccggccgtctacgagcgcctgacgggcctggagtacctgaacttcatcggcgacgtctacggcgtgccgaaagccgaacgcctccggcgcatcgagaaatggctggagattttcgacctctccgcggccgtggccaatccgatccagagcttctcccacgggatgaaacagaagatcatcctgatcgccgccctgctgccggccccgcgggtgatgatcctggacgagccgatggtcggcctggacgcccgctcggcccaccacatgaaagaaatgatgcgggcccattgcgccggcggcggcaccctctttttctcgactcacatcatggaagtcgccgagaagctctgcgaccggatcggcatcatcgaccgcggacggctgatcgcccatggaacgctcgaggagcttcgggcgatcgagcgcgagggccagtccctggaaaaaatctttctggagctcacggcggaatgaaaaacttcttccgtctcgtccgggtcggcctccgggtcaacttcggcttatccctcctccggccgaaaacccttctcgaaaacaagcgcgactactggctgatcattctgatcctcatggggatcgccggattgagccccgttctgctttactatctcaagggcattcgcttcctctacggcctcctcgctcccctcggccagcaggcggcccttctcacgttcgcattcctctcgggccaattcctgatcctcgtcttcggcttttactacgtcctctcggcgttctatttcgcccgggacctggatctcctcgtccccctgcccgtcacgccggcccaagtcctcctttccaagttctccgtcgtcgtcgtgaacgaatacctgacggcctcacccatcgtcatccccgtgctcgccgcctacggccttcattcccgggccggcctccgctattggaccggcgcggttctcgtctatcttttcctccccgtcattcccctggccgtcgtttccctcctcgtcgtcgggatgatgcgtttcgtcaacgtcgggcggaaaaaggacgccctgatgatcggcggaagcttggtcatgatggccggggcccttggcctgcagttctggctgcggggcctgcccgcctccggcccgggccggcaggcgctgatcgcctttttttccgagggagggatcgtccgcaaaatcggagcgtcgtttccgccgagcgtctgggcgacgcgggcgcttgtcccggaagccggagcatccgggctcggctcattcctgctttatgcgggagtctcggtcgggctgttcgcggccctcttcctcgccgcccgggcgcttttctaccggggactcctcggcctcggcgagatctccgcccgaaaacggcgcctctcgcgggaagctctttcggcccgtgtgtcctcgggccgccggccggtgcgggcgatcttcctccgggagctgcggatcatgaaccggacgccgatttttcttctcaacggcgttctctcggtcgtcctcatcccggtcattttcattatcttcgccagggcgggcggcggcggttcaggcggcgacgcgttccagatcatccttctcctggcctcgtcgaatccgtcggcggtgatcctcggctcggccctgttcatgacgatttgcggctgcctgaacggcacggcgtcctcggccttctcccgggaaggcgcccaattctggttgtcgaaggtcatcccggtttcgccggccgaccaggtcaaagccaaattcctccactccttcgccgtcgccggcctgggcatcctggtcgcggccggggccgccgtcgccgtcatcggggcgaagcccggctgcgttctcctggcgatgcctctcgccctggccgccgcggccgtcctgacctcgatcggaatgatcatcgatctcctccggccgctcttgaaatggacgaatccgcaaaaagccatcaagcagaacttcaatgttttgatcgcctttttcgccgacgcggggctgttgatcgtcctaatcctggccgtgacggccctgtacggggaaggcctcgggggcacgggggtcatcggcgggctggccgtcgttctggccgtactggccggcctgagcttcgctttcctgctgagaatcgccgcccggcgctacgcggagatcgaggcttgatttcgttccggccggaccgggagaggcggaggcggcgccttaccggatgatcttgtagatttcgcgccaagagacaacccggaggttcgacccgaccggctgctccagccgctcgatcgtggaatcgtactcctggatgtagacttccttcttggacgacgacccgcccccggcctgaagctccccgaccgtgacggcccgccgggccttgctggccagctggaggctttcgatcgacgacccgccggccgatttgagtcccgattcgccgatgacgcacccggccgccgtctggacataacgggcatacaaacggccggtctcggcaaggttgaggcatggattgacgttttcgatgctgcccatcagggagctgaaatagacgatcctgtccgagatgacggggtcggaccaaatcttctccccggtcgccatctcccccgtctgaagcgaggcggccagccccagctcatccttgttcccgatataccactccacgctcgccttggagcccgtgtcggtgaggccgatgaaggcataggtccggtcgcccggcgcccggtcgtcgcctcccgtcccgaagaggatcttcaaaggaaggccgcccgaagccgggtccggaaaaacggccggcttggtgatgatcgggtaggacatccggtcggtgtagatggtctgcagcgcccagttgttggcgttcgtgctggtgaagggcacacgatagagacgcccgtccaggtctccgaaatacacatagtccgtccgcccgtcccggttgatgtccacggccgtgggcgaaccgggaacggtgacctggatgttcgggtagggtttcgggcatttgttgctcaggctcgtgttgacgtcggtcgcgacggtcagggtcttgaggatcgctcccgtgtcgagccggatgacgtagaaccggttgccgatgatccgggccgtatcgttgtcgtacccggagccgacgaacgccacccagtgcggcgtcgttcccgacacgacctggccgaaggccgggaccgaccacgtctcgcccatggtcgccgaatccttcgcctcccacaagggaaggggatcgttcggatcggtgacgtccagggcgaaataataattcaggccgccggccccggtgctgccctttcccgctccctggccgcacatcaggaccgtccgccaccgcccgttgatataggcatcgcccacggtcggcgttccgtcgacgaaataatcgtggttgtacagccgggctccgttggcgtccctcaccgacatgttcttcagcttggggatgagattgaaggggatgaatccccagagctcgtcgcccgaagccagatcgaaacagtggagcatcccgtcgttggccccgatgaagatgaccggcgtccgagaggcattggcctcggcaaaatcgctgtaagacgatcccagggccacggcgtcccccgacggcggtcccatcaagaccgggctcgaatggaggatgtcgcccagcttccaggtccggtcttcgccgcggacgaagcggatcaagccggcgttgtcgccgttggggtcggagagaagcgatttgaggacgttgacgttcccctcggtgaaatcgatccgggtgagcgtgcccgagggtttgtacgccgtgaagatcgtccggtcggacgcctcgcgcgccgccagaagctggccggcgtcccacaggatggatccgccggccgcgacattccgccccgtcgggctgagcggatcggccgtggaaatcgtctggagggttgatccgcccgtgctggccaagccgatgtcggtcacatcgtaagcccggagctgtccctcgtatccggggaacatgaaggaggaggagatgatgagcttccggcgggttccggagatgatggccgcggccgcggccgacgaccgggaatactcccgccgctcgacgtagacgtattcaatcgccagccggtcgacggacggcgtttcgtaagaggactcgccgaagccggagatcgcgtcgtcgggggcggtcagaacagccttccagcggagcttggagccgaaggtatggaagtcgtgccaggcttggttcgtgacattggcgatcgcggagcccgagaattggccgtaatactcccaggaaaaaccgtcgtcgttggacaggtaatatgtgacggtcagtccggtggccgaggagccgatgacgccttggtcgatgatcgtgaagcgggcccgggtgatggcgtactgagttcccggcagggacggcgtcaggttcgtcgagagaccgacgcccttcaggttgtagacgtcggcgatggagttgagaaagacgtaatagtagtcggtgtggttgccgtcggccatgaggaaatccatctggccgtcgttgttgtaatcgaggatcatgccgcagtcgaagtcgtagaccttgggggttttcacctgcccgtcgaagaccaggctgacggtgaaatcggcgttcccgccgttcttgaaataatagcacttgcccccgtagccggtcgcgatgcccgattggccggggtagccgcgcacgccgttccagcaccagttgtccgtcccgatgatcaggtcgatgtccccgtcgccgtcgaaatcgtcgcataagctgatcgtggccgcgccgtcgtacatgttgttgtagagatcctgggtggggtccgtgaagtcggccagccactcgaatccccccaggccgtccccgcgatagtacttcagctcggggtaatcgcagctgccgacgatcatgtccaggcccggcgactcgtcgaattcggcgatcgagatcgtgctgacgcccagcccggtccagcccgtctcgaccatgacgtaatcgacgataaacgtcgaggcgttgatcttgccggagccggtgttcgtgatcttgaagaccttgccctcggtgttcccgtaggccatgtcgacgtcgccgtcgccgtcgaggtccagggaaacgatccccgtcgacgaccagcccagggttttgagaagcggccgccaggccgacgtcaagtcggtccggacgaactccagaacgccggtgttgacgccgttatgaatgagacggttttcaaaaagccagacatggacgagggtgtagggcgaattaaagacggatgtgacgtagaaaaagtcgaggtctccgtcgccgtcgtaatcgccggccgtcatcgagccgtggtatcccgactcgatggccgccccgccgacgccctgcgtcgggatcccgctggaattcccggtcgagccgtcgatccagaggtcggcgacgaaggtcccgatattgccgttgactccgtcgttgcggacgaagagcagggcgttggagtactcgctgctcgacccgatgtaatcgatccagccgtccaggttgaaatcgcccgcggcgatgacgctgatccagccggggacgcttgccggctggctgacggcgaagttcgccccgagcttgttgagggtcatgatgtcccggggatttgcgtcatcggcgtaccaaagcttggccgagcactggggcaggtcgaggttcgttccggtttggaaagtctccgagaccgtcccggaattttcgacgcaggcctgaccgccggccgggcggctctgaagcaggaaaacgagaaggaaggaggccgcggccgcggctccgaggcgaaggcgtttgttcatgtcgattctccccctaagcgccggcgacataggccaagacaatctccagccgggtcgtcgccaggatccgcgatccggaacggacgacaccgatgacgaccaggaggacgtcattcggatcggcggctcccccggcggcttcgtcgttgatcaggaacgccgtgtaggacaggcgagggtcggtcgccccggtttcggtcgcggcgaacgtctggttgaagaacaggagggggccgtaatcgggcaccccgtcttttcccgggtccagggacagaaggagctcctcgtcgggcacgcggcggaaatagttgggattgatgttggttccgatgagagggcggtcgatgttcgacggctgagtcagggtgtggccctcgaagttcaaccaggatccgtcgccgaaatactgcttgatcacggcctgggcggcgttgaatccggcctcggccgcgttgaaagcctcctcctgggaccgcagcccccccgacatcttcggccccatcgacgtcagcgtcagcagagtcatgcccagggcggccaggccggcgacgatgaggatgacgatgaagagccccgccccccgctcccggttccggtgcctcatcttccccctgttcatcgcaagcccgtgttgaagagattcacggaaaggttccggatgttcgcggtcgattccaagaggaaacgcttccgccaatcgggggccgtagccgccggcgtgttggccactgccggccgggtatagagaccggccgacgtccccgtgtttcggccgacggaggcgaagggattcggcgtccggccgaggatgaggatccgaacctggcggatccgcgagatctgctcccgcgtccaggtcgtatcccaatccttgaatccgtccaagaggccctgggaatcgccgtcgaagtcgccgttgtactggaattggatcgtttcgatattctgggcgatggggaaatgggcgccgttgagggtcatatagaggacgccgccctggccgccgccgatgtacccgttcgtcccggccgtcaagccggtgacattcccggtgacgtcgagccagtattcgcgcaggtcgcagaacatgagcgacccgccgatgaagtcttcgctcgagcacacgtctgaaaggccgccggggggattgatcccgggagcctgcccgggcgaaaaattgaccttttcgttcgtcccgtccgtgttatgagtaacatgggagatgacccggacggccgcgccctggcacgacgagccggcgttagggacgatcaaggcgacctttccgacatagaagctgtccggatagggatatttctccagagaataatcatccatgctgatgttgaccgccgatccggaatacgattggatgttcaggatcaagggattttcgagatttcccaggattttcagccggtcgggcgtctccgtcgtccccgtcgtctcattgtccaccccctccagggcgtagccggccaaagcctcggtcaggccggtcccgctcatccgggcgtcccgggagacaaaatacatggccgcccggacgtccgtttgcatctcgatgaattgctgctgatcggccgaaatcttgttgctccgggagtagaccgacagggcggccacgacgacgacgagcatgatggcgctgccgatcaaaagctcgatcagggtgaatccccggacgcgtcgcgaaaaagcggagcgatgttttttcatggcggtgctcaccggatgatgattgaatggaggatggcccggacgttgtaggaaaacggagcggccagcaaggccgcggacgtcttgccgacggccgtcgcggggaagacgagaattttgaccgcgtagcccgtcccgccggtcgtgatctgcgtgattcttcggaaatcggcgtagccgtcgccgttcgggtcgagggcttggtcggcggattccccctgggcggtcgaggggaacacgctcagttcggccgcggtcaaggttcgaagatagtcgagctgctgctgagcgaggaacgtggcgtggctgatctcccccgccctccggttgttgttgacgctgagaagaaaggcctggcccaggccgagcatggcgattccgatgatcgagatcccgatcagggcctcgatcagggaaaagcccttttccccctccgccgttttccgccgccggacgagtttaagcatgagtcaccccgtggatcccttgatgaattgcgtcgacccgctggcatagaagcggatggtgcggtaatggggctcgcccaggagcgccagccgcgaggaggaaagggagatctgattcttggcggtgtcgaagccggagacgaatccggtcccgtcgaaaacaatggaaagatcggccggaagggtcagggtgacaccgaactccgagggaatgcgcttcacctgctgcccctgtttcagggtccatgttccatagggcttctcgatctcgatccggtacgtccagccggccgaatcgctttcaaaacggacccggtggaaatacttggtgttgacggcctgccacttggccacctggagggttgtcagaatatcgcgggaggcgttgtcgaagctccgcatctcgaacgaattcttgacgctggggtaaaaaatgacggtcaagatgccgatgatcgccagggtgaccagggtctccagcagggtgaatcctccagcccgccgaatccgggcgggacagcccccaggacattctcttccccgaatcatgtaaagccctcggatatcctttttcggcaattctccgattgttactatagtccatcggcgccgattctgacaatcatcagatccggtgagatggggggtgatatggcggccggggggcggctagccggttcccgcccctcggccgcgccctccccgtttgaaaaggaaacggaggcatggtataagcggttccgtggaaaaaaaggaccggaccctgcttgtcgtcaacccggtttccggccatgggcggggacgaaaagtcttcggccgaatggagcccgccctccgcgaggcgtttccgggactcgaggtccgcgtctcggaattcccgggccaggccttccaattcggccgcgaagccgtgcgcgatcgctacggccgggttctctgcctcggcggcgatggaacgccgttcgaagtcgtcaacggcatgtacctccagggccgcccgccgttccttcccgagatcgggatcatcccctcggggaccgggaattcatttctcctggaattcgggattcaaacccccgaggaagccctccgccgcatcgccgccggccgccgggtcaaggtcgacctcctggaattcgattaccagcggaacggccggccggaacggcggtattccctcaacctgatcggcgtcgggttgatcaccgacatcctgaagctgaccaacgactggctgaagtttcttcacgccttcggctatagcctggccgtcctgattcgtctggccagaggcatgcacaacacgatcgacctcgaagtcgacggccggaaatggaccgtgcccgacagcgccctggtcgtttccaactccaagtacaccggcgggaagatgaaaatcgccccgcacgccgaaacgtcggatgggaaagccgacttggtgctcttccgaaacgtcgaccggagggaaatgatccaaatcttcaagggcgttttttccggagcgcacgccgcccatcccaaagtggacatcatccagggcgtgaacatgacggtctccgggacgccggatctccacgtgatggccgacggcgaggtcctcggacggacgccgctccgaatcaagctgcttcccggggagttgacctttctcggatgaagccgttgttcgaaacgctccgctccatttttctctggaccctcgcttttcccgtgttcgtcctcagctgcctggcgattcttctgacggccctgttcacccggggccgcgccctggaacccgtcattaaaaccggctgccgggtcgtcctcttttgcgccggcgtccgggtccgcctccacgggcgggaaaacttcgacccggcccggcaatacctcgtcatgatgaaccacgtcagcctcctggatccgctggttttctacgcccggtttccgggccgggcccggactgtcgaggaggagcggcatttccgctggcccctctacggcccgatgctccggcggatcggccagatcccgctcgaccgctcccatccccggaaagcacgggaaagcctggcccgggcggccgaattcatccggacccggaaggatttttccttcattgtctttcccgagggcacgcggacgctggacggcaacctcgggcccttcaagcgcggcggatttctcctggccgcggaagcgggcctggacatcctgccgatcgttcaaacgggagcgtaccggatcatgcgcaaggggagcaagcggctgcggcccgggcgcatcgattgctacctcgagccggccgtcgccgccgacggctcctcgcgccgggacatcgccggctggatggaccgggtccgacgcgtcatcgagcaaaggcttgacggaccggggatcctggcataaattgggggcaattcgatcctttggaggtcgatcatgccccagacggaaaagacttcaacgcttgccgccgcggcccccgacacccgcatcctcgtcgccggcgccggcggtttcatcggcggatcgctggtccgctatttcaaggacaagggctttgcgaacatccgagccgtggacaaaaagccgctgtccgactggtaccggaaaacgcccggggtggagtgcctttgcctcgacctgagccacgagaagaactgccgccgggcggtcgaggggatggacgaggtctaccagctggccgccgacatgggcggaatgggatttatcgagcggttccggatcgagtgcctgcggtccgttctcatcaacgcccacatgatcgaatcggcctatcgggccggcgcggcccggtacttcttttcctcctcggcttgcgtctacaacaccgatctccagaagaatcccaagatcacggccctcaaggaatccgacgcctatccggcgatggccgagcgcggctacggctgggaaaagctcatctccgagatgttctgccaggagtattgggccgagcgcggattcaagacgttcatcgcccggttccacaacgtctacggcccgtgggggacgtgggacggcgggcgggaaaaggccccggcggctctctgccggaagatcatcaaggcgatcgatgacggaacgaacgagatcaagatttggggcgacggcacccggacccggagctaccagtacatcgacgactgtgtcacggggatcgacaagatcacccactgcgaggagctgatcgccacgcccatcaacctgggcacctcggaactcgtcagcgtcaacgaactcgtctcgatcatcgaaaaaatcgccggtgtcgccgtgaagcggacctatgacctaaccgcgccccaaggcgtcggcggccggaactccgacaacacgttcatcaagaaaatcctcggttgggagccggatatcccgctgcgggccggactggccaagacctacgcctggatcaaggaacaatacgagcggaagaaagccggtttgaaaaccgtcgattgaccggcgggaggacggccgccggcctcatttcctcgccgcggccaggaccgcctcgacttcggccgtcgttttgggcttggctttgcccaaacgccggcttccccggggagtgatgacgaaatcctcctcgttgcggatgccgccgaacgtccggtatttctcgaccttgtcgtaaacgatgaaatcggtgaacttgccctcggcccgccactggtcgatcagctgcgggatgaaataaatccccggctcgatggtcacgacgaagcccggcttgtgcggccgggccagccggagggatttcagcccgaactgggtgtacttcggacggccttcgtagccgacatagacctcgcccaagtcctccatgtcgtggacgtcgaggcccatcatgtggccgacgccgcagggaaaaaacaaggcgtgggccccggcctggacggcgtcttccgggtcgcccttcatcaagcccgcctccttgagaccccaggcgatggtccggcacgccaagaggtggacatcgaggtggttgacgcccggacgaagcgctccggcggccgcttcatgtgcggccagggtgatgtcgtagatctcgcgctggcggccggtgaacgtcccggaggccgggacggtgctggacagatccccggcgtaatgaagagccgtctcggctccggcgtcgaggagaaacaagtcgccccttttcaaccggttgccgtggtcatggttgtgaagcgtttccccgcgaacggaggcgatgatggggaaagagatgtcgcccccggcggcgagggcgacgcggtggacctcggccgcgatctccgcttcggcgacccccggccggaccatccgcatcgccgccacgtgcatgtccgtggagatgtccgccgcccggtcgagctcggcgatttcctcgggccccttgaccgcccgttgctcgacgaccgcccggatcaaatcgaccgaagccgcggccgcggcccggtccgggttcaggccgagccatcgtttcagcttgagggcgttttcggcccggtacggcggcaggaaatgaatccggcgcccggcccggcgggcgtccttcagccgcccggccagctcgtccgccgtcccggtccgatcgacgccggcccggcggctcatctcccggatggccggctgagggcctcgccaaacaatatcatcgaccgtatagtcgtcgccgcagacggtcgccgtcccctcatcgaagtccatcaccgccgccaggccgggccggtccagcccgaaataatagagaaacgtgctgtcttgacggaagcgaaacgtgttatcgggataattcatcgggctttcctcgttgcccaggaacaagcccaggcccgatccgaccgcccggagcagccgttttcggcgttctttataaatccgcggttcgaacatcaaagaacctccttcagcattttcgccggccgataaaaccagggacctccgtcctcccggcccgggaggattatctgaccttgtcagggagcccggcgccgcaagtctcgaggcggcctcgccgccgcggacggatgtccggcttccgccgggcgcgtattctctcatgaaggcgccggaaatcaaagggttttccgcttgaccggagaatgggaattgcgaatataataagtcatcccgcaaaggaggagccgtttcatgaaatctcaaatctgggaccggcggtcgtttttgcgtctgtgcggagccgtggggataaccgccgccgcggtcaacgccggcgggctcgaaaggatcgaagccgcggcccggtcgaccgccggccggacgcccgaggagatcgccgccgatgaattctactggagggaagtccaactggcctacaagctggaccggaccctgatcaatctgaacaacggcttcaccgctccctgtccccgcgtggtcctcgaatccgagttccgctacctggaaatgatcaacatgctccccgtccattaccaggcgatggtcgccgagaacgtcgagacgatccgtcggcggatggccgcggaattcggctgcgccacggacgagctggccctgacccgcggagccagcgaatccctgcagatcgtccagaacggcctcgacctcgaagccggcgacgaggtgatcacgaccgagcaggattacccccggatgctgacgacctgggatcagcggatgcggcgcgaggggatcaaggtcacccggctgcagtttcccgtcccggcgacgcaggaccagctctaccggctgttcgaggaagcgatcaccccccggacgaaggtcttccatttctgccacatcaccaacctgacggcccagcttttccccgtccagcggctggcccgcttggcccggtcgcgggggatcgtgacgatcgtcgacggagcccacgccttggggcaattccccttcaagctgagggatctggagtgcgacgcctacggcgtcagccttcacaagtggctgatggcccccatcggcaacggctgcctttacgtccgccgggagatgatcccgaaattttggccgctgcaggccgcgcctgaacagcaggacggcgacatccgcaaattcgaagccatcgggacccatccctggggcatccgggccgccctcggcgaagccctagccttccaccaagccgtcggcggcgagcgcaaggccgcccggctgcgctacttgactctccgctgggccgccgccctcaaagcccatccgcgcgtccgtatcctgacgaatctcagggaaccgcccgaagcctggggcgtggccgcggtcaacgtcgagggcctcgatatgcggaatctcgccgccttcctgaaatcgaagtaccggatcgtcgccgttccgctggtcggcggcgccccgcccaaccaagtgttcgactaccaggctctccgcgtctcgccgaacatctacacgacgctcgaggagatcgatacgttcattgagggcatggaggacgcgatcaagaacgggatcccgcccgagggggggacggccccggccttccccatggagtccgccggctgacgcccgcgcgcccggcaaagggagaacgctcatgaaatctcaactccgccgcgcggcggccgcggccgccgtcatcctggctctcggaacgctgaacgccctggccgccgaccggtacgtcatttcgtttcccttcaaggccgccggaacaagctttccggcgggggaatacgtcctctccctgaaggaggacggaggcctcgtcctgcgccgggaatcgacgggagccgaaaccgtccttccattcaccgaacggatcgcccggtccgctccgccgggcgaggagccccggctcgtattccacatggtcggcgatttcaagccgtcctattcggaatacatcacggtctatatcctggccgaagcctggccgccggaggtggacggtttccgcctccacacgaccaagggagctcacaaggagatcgccgtcaagggcgcggtcaaggagccgtagcggcccgcttcacagaatattattccgaaatttttgaggatacagactgcacccctggaggattaaattcatggaatctctcgtcatttacgactcgaatcacgggaacacccgaaaaatcgcggaaacggtcgcggaaatcctgggcgcgccggccgtttcagtttccgacgccgggccggagcatttttccggcctcgggctggtcgttgtcggcagcccgattctcggctggaagccgtcggagagaacgcaggcctttcttgccgccttgaaaaaggaacagctcaagggcgttaaagccgccgccttcgacacccgggtcaaattgttcatccacggggacgcggccggcaaaatcgccaaggtcttggccgacgccggagcggagatgatttcggaaccgcagcccttttacgtcaaaggaaaagaaggcccgcttttcgagggcgaattggaaaaagcccgggcttgggccgcgactctgaaggcaaacgccggcgtctgagcggtccgcccggcccgtttttcacggccggtaaacggggcggtcgagcttttccgcctcgcgctgggcgatcaggcgggccgcccggcgtttcatgacggccgccgtccggacggtgttgacatgggcatcggtcgtctcggccggatcccgggagtagcctccggccagcagaatcacgagggggattttccgcagaagagccccctccatgatgatccggtcgcggctcagcaacccggctttcgtcacggccaggccgcccagctgatcgccggccagcggatcagccccggccaggtagaaaacgatgtccggcgggaattcctcgtagatcttcgggaagtggcgccgcaccgcttccaaataggcccggtctccgtctcccgaccacagcccgacatccagggtcccggtcattttttccgaagggtagatgtccatttgatggatggagaacgtgaaaacgtcctcccgcttttcgaagatcgcggccgtcccgttgccctggtggacgtcgcagtcgacgatcatcacccggccgacccggccctcccgctggagcttctcaacggcgaccgccgtgtcgttgagaaggcagaatccctcgccgtggtcggcgaaagcatgatggaatcctccgccgagatggatgcaaagcccgtcgtcgagcgcccgctcggccgccagaaccgtgccgccgacgttcaaccggaaaaaggagatcagctcggcggaaaacggcaattccagcgcctggatctcgtccttcgacaggcttccggtctgaagcttgcggagatatttcagcgaatgaacgagctgaagatcctcgaaggaagccggctcgggcttgaggaagttttcccttcgggcgcccaaggcggcgagccgctcatggaccatccggtatttcctcaccgggaagatatgtttcccggtattcagcatccagtattcctcgtggtacacgaacttgaagggaaaacggcggccgaaaagaacttcaagaaggcccatggcggaaggcaaagcatatcatagggattccccctgagagaaacccttttctccccgctttttcggataggtcatccctctcgacccgcggatacaaggacggctttcgacgaaatcatggacgaacgcgtcagccccgaggcacaatcgactgaaatgacctgatattttttctttggtactccgctctttctttttaacgccggcgagagccccttagatgtctgaaatgtgatataataaacactaattccgcctgaatctggcgccagggagattaaggagataacgtgagcgattttcgcatcgatcgtcaccccatcctcactccaagccccgcggaaaaagtcgccatgacctggaaaggccgtccaatttccgcccgggccggagaaaccatcgccgccgcccttttcgccaacggcgagcgcgtcttcagctaccatcccaaggatcgggctccgcagggcattttttgcgccaacggccagtgcgcccagtgcctcgtcctggccgacggcctgccggtcaaggcttgcatggagctggtccgtcccggcttgaagctcgaaccggtggacgggcttcccgtcctcccgcctgtttcaagcccggtccgcctttctcccatcgaggaaatctccgtccccgttctcatcatcggcggcggcccggccggcttgtcggccgcgatcgaattcggcaagcgcggcgtttccgctcttctcatcgacgacaagcaccgcctcggcggcaagcttgtcctccagacccaccggttcttcggctcctataacgcagtgttcgccggaacccgcggcatcgacatcgccgccaagctcgaaaacgagctccggacttatcccagtgtccggatctggcttcagagcaccgctctggccgtctacagcgacaagaaagtcggcatcctcagggatgggaagcgctacgtccaggtgaatccggaagtccttctcgtcgcctcgggagcccgggaaaaatccctggccttccccggcaacacccttcccggcgtttacggcgccggcgccttccagacgctcgtcaaccgggacctggtccgctccgccggccgcctgttcatcgtcggcggcgggaacgtcggcctgatcgccggataccacgccctgcaggccggcatccccgtcgtcgggctggtcgaagccctccctgaatgcagcggctacaaggtccacaaggacaagctccggcgcttcggcgtcccgatttacacctcccacaccgtcgtgagcgccaacgggacggacggcgtccagtccgtgacgatcgccgccctcgacaaggattggaaggctgttcccggctcggagaaatccttcgcctgcgacacgcttctgatcgccatcggcctcgacccggtcgatgagttctacgacaaggcccgggagttcggcctgcccgtctacgcggccggcgacgccgaggagatcgccgaggcttcggccgcgattttctcgggaaagatccgcggcctggaaatcctcaaggccatgggccggaacgacggcgggatctccccggactggtacgcaacggccgatatcttgaagtcccggccggggaaaaccgttcccgaggctccgcccgaaggggagacgggcgtttttccggtccttcactgcgtccaggaaattccctgcgatccgtgcacgacggtctgtccgcgcgacttgatccacatccattcgggcgacatccgcggcctgccggcctttgaagccctcgacccggcccgggcctgcaccggctgcgaaaaatgcgtcacgatctgtcccggcctggccatcgttctcgtcgattaccgcaaggatcccgcctctccgaccgtcacgatcccgtatgaatttctcaaggatgggatcgacgtcggcgaccgggtccgcatcctggacaccgaggccgccgacctgggggaggtcgaggtcgtcggcgtccgttcgatcaaagccaacgaccgaacggttctggtcaaggtccgggctccggcggccgtcgccaagaggatcgccggcatccgcgtccaggatccggccgccggcaagcccctggaccgcgtcgtcgagcggacggccgacgacgtcatcgtctgccgctgcgagcgggttgcggccggagagatccgggccctcatccgggagggattccgtgacatcagcgccatcaaggcggtaagccgggcggggatgggcgcctgcggggccaagacttgcacggctctcatccaccgcttattccgggaggagggcgttccggaaaaggagatcatcgaccagtcgaagcggccgctgttcatggaggtcccgctgggaaccttcgccggcagcgagccggggccggtccgggaaggaggcgatcgtggccgctattaagtcctccgcggacgtcatcatcatcggctcgggcagcgtcggaacgccggccgccctggccatggccgaaagcggcctccgcgtcctcgtcatcgaccggatgcccagcgtcggccaaggatcgaacaagggggccatcggcggaatccgggcgacccactccgacccggccaaaatccgcctctgcctgcgctcgcttgagattttctcgacctggcgggatcgccgcggcgacgacatcgaatggcgcaagtgcggatacatgttcgtcgcctaccgccgccaggaggaaaaggctctcaaggagcttctggtcacccagaaggcgttcggcctgaacatcgattggctcgaccggaaggcgatgcttgaaatcgtccccgatctcaatcccgagggcctgatcggcggaacgtattcgcccgacgacgggagcgcctctcccctcctttcggctcatgccttctggcgggcggcaaaaaaagcgggggcgatgttccgcttcggcgaaaccgtcaccggcctgattatggaaaatggagccgtccgcggagtccggacgaacaagggcgaatatgccgccgagatcgtggtcaacgcggccggcggctgggcggacgaggtcgggcgcatggccggtctcgaccttccggtcaaaccagacgcccacgagggagccgtgaccgagccggtcgccccgttcctccatccgatgatcgtcgacatccgcccgaccgacagctcggtcaattattatttctaccagcacgccaccggccagatcatgttctgcatcaccccgaatcccagcatctggggcctggaaaagcgcgaaaccagcacgttcctgcccatggtcgcccaccggatggtcaatctgatcccccggcttcagaacctgcgcgtccggcggacatggcgcaacgtctacccgatgacgcccgacggctttcccctcgtcggctgggcccgggaagtcaagggactgctgctggcggaggggatgtgcgggcagggattcatgctcggtcccggtctgggagagcttctggcccgcatcgtccgcaacgatctgccggccaaggaccgggaaatcctggccctgctctcgccctaccgcacgttcgaaggccgggaaaaactgcaataaccgtccggttccgctgtgttctcatccggcccgcgccgggacgttgccgaaaccgcctcccggctttataatgggcgtactttccagaaaggagagcgccggatgaaacgacttcccgccttcctcgccccggcccttatcgcgatcgcctcggccggatgcgtcatggccccgcggatcaacctcgatcgcttcggaaccatcggtttcatcggcttcgacacccgggccgagggaaacatcgacgagtacgccaaccaggtttttctcgaagtcctgctccggtcccagcccggaaccaggatcatcgatctcggcccggcggcgacggttttgcgcggatcgaggtcgcccgttcccacgccggaaatcctggccgatctccggagccgctacaacgtcgatgccgtgctgaccgggatcctcgacgtctccaaggcccggccgcgggtggaactgggagccattcttctcggttcgatccgggcttccgtcgacatggacgccttcatgtccgcccggctgatggacacccatgacgggacgacgttctggatggactcggcccgggtccggatggacatcgccgatctcagcgtcctgaaaaacgggcaggtgatgttcgacgcccgggatcccgagcgggcttacggccgcctgatccgcgagctcgtcctccggacgacccgtgatttccgatgaccttcaccttcgctcacaacaacgtcaacgttttcgacttggaccggagcctggccttctacaaggaagccctcgggcttgcggaagtccgccggatcgccgccaaggacgggagctttctcatcgtctatctcggcgacggccggagcgcccaccgccttgagttgacctggcttcgggaccggacggaaaaatacgacctgggagacaacgaaatccacctggccttccggacggacgactacgacggcgcgttccggaagcacaaggagatgggcgtcgtctgctacgaaaatccgacgatggggatttatttcatcgaggacccggacggctactggatcgagatcctgccgcaaagccggggctgagctcccggcccgcctcgtcaccggatcaggtgaaaggcggtctgccggacatccaggaagcgcgatcccgtccggccgaagacggcgtcctgctcgagggcgatccggacgtccgtcccgccccattcggggaccgcggccgtgatgttgagttcgatcgaataaaccgtgtcggcgaacagggggtaatcgccgtccccgggaacgccgttctgcttgtcccacagcccgatcgtcgggccggcggcgtggccgtgatacccgaggggatgagtataaatgctcggccggagtccggccgccttggctttccggagagccgaagcgaggatctcgtttcccgcgcggccttccttgaattcctcaagcaggatgtcctggaggagatttccttgagccaaagccgctttcaggccggccggagcgtcctcctcccccggcctgaggacataggcgtgctgctgcgtgtcggtgcacaaaccgagataccggatgccgaaatcgcaatgaagcaagtcgccccgatggatgacatcggcctcgccgtccagggactcccccggccgctggatctcgacggacggctggaaccacgtctcgagaccgagggacgagacccgctctcggagcctccagacgacgtctgaaaccgtcgtcacgcccggcgtgaccgcgtcccgggaaaagacttcggcgatgatcgcgtgggcgacggcggcgatgtggtcgtagacgtccagctcgtcgggcgtccggcgctcgagccagccgacggccaagcgctcggcggagacgagccgcctcgaaagatcgggtccgagcgcccggacgagccgggccttgtgcgaggccgagagcccgtcggcgaaggcgaagacgtcggattcgttgattccgatccgggacggattccgctccttgacgatttcggccagccggctccactgatcgatcttctccggatcccaggaggccgggtacagcttgccgatcccgtagcgcccgaccgtcaagcgctcgattccgttcttgccccggtcgaaaaagacgagcatggtcgtccggcgggcggagtaggagtcggccggaaccagggtcagataaaccggatcttcattgtcctcggcacagatcacgagccacatgtcgatcttttcccggcgcatgacctcgggaagaacggtttccaggcggaggccgagccaccggtcgcggaccgcggcccggtccttcaagccgagaatcgcggggatgtcccggccggacgccgggcgaggcccggcgaaaaaggcagccgtaacgacggccagaaaaataaaaagacgaatccgcgcgtttttcacgcaacctcctcccggacgcggccgtccggccaagggctccgaccgctcagcgccgtcgggatgtttttatcgcctttttcgcagttgaagccggcttcttgactccggcggaggcctttccttccggagcgcccttcaaggccgcccgggccgccgccaagcgggcgatcggcacccggaagggcgagcagctcacgtaattcagcccgatctggtggcagaactcgacgctcgaaggctcgccgccgtgctcgccgcagatgccgagcttgatcccggggcgggccgcccgccctttctccacggcgatccgcatcagctgtcccacgccgtcctggtcaatgacctcgaacgggtccttggcgtagatgcccttttcgacgtaagggatcaggaaacggccggcgtcgtcgcggctgactcccagggtcgtttgggtcaggtcgttcgtcccgaagctgaagaattcggccaccgaggcgatttcgtccgcggtcagggctccgcgcgggatctcgatcatcgtcccgacatgatatttgaacttgaccgctttttccttcatcacggcctcggccgcgtcccggacgaccccttcctggtcagccagctccttgacgttgccgaccagggggatcatcacctcgggctcgacggggatgccctttttcttggtgtcggcggccgcttcgaatatcgcccgggcctgcatctcggtgatctccggatagacaacgccgaggcggcatccgcggaatcccagcatcggattgaattcgtggagcgaatcgacccgggtcttgatcttctcatagggaatgcccatctccgcggccagggcccgctggtctttttcggcttggggcagaaattcgtggagcggcgggtcgatcgtccggatggtcaccgggaggcccttcatgacctcgaaaatgccggcgaaatcccgccgctgaaggggaagaagacgggccagggcggccttccgctcggcgatcgtgtcggccaggatcatctcccgcatcggctcgatctttccttcgccgaagaacatatgctcggtccggcagagaccgatgccttccgccccaaaggccacggcattggccgcttggtcgggctggtcggcgttggtccggatcttgaggatccggaccttgtcggcccaggacatcaccttggcgaaggtctggtagacgggggcgtccttgggattgagggatttctggatcaggacctgaagaacctccgaaggcttggtttggacccggccctcgaggacctcgccggtcgtgccgtcgatcgagatccagtcgccttcgcggagcttccggcccttgacggtgaccgtctgggccgcgtagtcgatctccaactcgccgcagccggccacgcagacccgccccatctggcgggcgacaagggcggcgtgggaggtcatgccgccccgggccgtgaggatcccctcggccgcgttcatgcccttgatgtcctcgggcgaggtttcgatccgggtcaggatgaccttctccccgcggccggcccaggcctcagcgtcgacggaattgaaaacgatccggccggaggccgccccgggtccggcgttgagccccttcgtcagaaggcggccggccttgatcgcggccgttttttcggccgggtcgaaaatcggccgaagcagctgattcagctgatccggttcgatccgggacagggcttccttctcggagatgagcttttccccgaccatgtccacggcgatcttgatcgcggcgaaggcggtgcgcttgcccacccggcactggagcatgtaaagcttgccctgctggatcgtgaactcgatgtccatcatgtcggcataatgcttctccaggacatgacggaacttttcgagctgagcgtacgacttggcgtcgtccttcttcagcatgacgatgggcaggggggtccgaattccggccacgacatcctctccctgggcattcatcaggtattccccgtagaagacgttcgccccggtcgccgcgtcgcgggtgaaggccacgcccgtcccggagtcgggccccatgttcccgaagaccatgagctggacgttgacggccgtgccccaggcctcggggatgtcgtacatcttccggtaggcgatggcccggtcgttcatccaggaatcgaagaccgccccgatcgcgccccagagctgttcgcggggatcctcggggaattcgagaccggtgtttttcagaatcgcggccttgaaccggacacacaggtccttcaagtcgtcggccgtcaagtccatgtcggctgtcaggccgcgctccgccttcttttcctcgatgatcttctcgaaggggtcgacgtcctccttccggacgggcttgagccccaagacgacgtctccatacatttggatgaagcggcggtagcagtcgtaggcgaaccggggattgccggtcttggcgatgagggccgcgaccgtcttctcgttcaaccccaggttgaggatggtgtccatcattcccggcatcgaggcccgggcccccgagcggatggaaacgaggaggggattcttggaatccccgagggtttgaccggccgctttttccagcttcttgaggtttttatcgatctgggcccggacatcggccggaatccttttgcggttcttgtagaagagatcgcagacttccgtcgaaacggtgaagcccggcggaacgggcaggcccagcccggccatctcggccaggttagcccccttgccgccgaggatgttcttcattttcatgtcgccttcggccccaccggcgccgaagaagtagacgtatttacggctcatggcagtctccttgcaaatcgcgggaatatagtcgcggaaatatacaataaatcccgaagcgcggtcaaacccgtgtttcggcgggaaaagccctatttctcgaccgtggccttgtacttttccaggccggcccggaagacgaccaaagcccggcggaggtcatcctcattaaggacatacgccgcccggatctcgtcctttcctttccccggcgtgccgtaaaagcccgattccggggcgaccatgaccgtctggccgtccaggcggaagtcggtcagcatccagatgacgaatttctccgtgtcccggacgggaacgcggacgctcatgtaaaacgccccctccggcttgcggacgacgactccgggaatggccgacaacccttcgaaaaggacgtcgcgccgccgctcgtattcccgccggacgggctcgaagtagcccatgcccatcttgtaggcggcgatggccgcccgttgttcgatcgtcggcgggcacagccgggcttgggcgaacttgagcatcgccgcgtacacctgatcgttccgggtgatggccgctccgacccgggcgccgcagcagctgaaccgcttggaaatcgagtcgacgacgatgacccggtcccgggcctcctcaaattccagcaggctgatatgccgccggccgttgtagacgaattccttgtagacctcgtcgccgatgatgaacagattgtgcttgaccgccagcttgacgacccggccgagctcctcggcggtgtagacggtgccggtcgggttgttgggcgagcacaggacgatcgcccgggtccgaggcgtgatcttggcctcgaattcctccgccggcgggaggcggaatccgtcctcgaccttgagcgtcagggggacgaccttgagggcggccagcgaggcataaccgttgtaattcgtgtagaacggctccggaatgatgatttcgtcgccgggatcggcgaccgtggcgaaggccatgaggatagcctccgagccgccgagagtgatgaggacgttgtcggccttgaggctgatcccgtaatccttgaaatagccggcgatggcttgcctcagctccaggaatccctgggccggcccataacccagaatggggtcgttgaagctccggacggcgtccagaatcggcttgggcgtcgggatgtcggggtcgccgatattgagaaagaaaattttaacgccgtcggcgatcgccgcgtcggcataaggcttgaacttacggatgggtgaggcctggaccgtttggccccgtcgagagatatccatggcgaactcctttaccgggaaatcgtaggaaatggaagaggtgattatggcccaaatccccccattctgtcaaaggatccgcccaaaaaacggtctcttgcggaggccggctcgctggagttaaactgttttccgccatgaatctggcgccggacgctgttctggggcattaccgcctggccgagaaaatcggcgaaggcgggatgggagtcgtctggaaagcccgcgacttgcgtctcgaccgcgacgtcgccgtcaagttcctgtccgaaggcccgtctctgtcgcccgagcgcagatccctcctggagcgcgaagcccgggcggtcgccgccctgcgccaccctaatatcgtcacgatttattccatcgaggaattcgaagacgccctcttctacaccatggagctcgtcgaggggacgccgttgaccaagctcatcgttcccggcgggattgagttcgaccgtctcctggccgtcgccttccccctgaccgaggcgatcgccgccgcccacgaccgcggcatcatccaccgcgatctcaagcccggaaacgtcatgatcgagccggacgggaagctcaaaatcctcgacttcgggctggcccgggttctcgagccggtccttcctcccctgacggccgggggcgaggcggacaccgagacggcggaaacgggcatcaccgggacgctttgctacatgtcgcccgagcagatccgcggagaagccgtcgatcaccggaccgatctcttttccttcggcgtcgtcctcttcgagctggccacgggcatccttccgttcagcgggaacacggcggccgacctgatctcctcgatcttgagggacgagccccgctcggcggtcaaggccaatccgcgccttccggcctcaatcgaccggattttcggcgggttgctcgaaaaggacgcccggtcccggatcgcctccgctcgaagcctccgggattctctggaagcgctccgccgcgaaagcgccggccggcagggcgaagagatcccttcgatcgccgtccttccccccgtcgacatgagcccggagaaggaccaggcctacttctgcgagggaatcgccgaggagatcatcatcgccctcggccgggtgaagcaactccgggtggcctcgcgctcagcctcgtttcagttcgcgggcggatccgtagacccccgggagatcggccggcgtctcaatgtcggtaccctgctcgagggcagcgttcgaaaagacggcagccggctccggatctcggcccaattgctggacaccctccacggcttccagctctggtcggagatcttcgaccgggagcacggggatatcttcgccatccaggaggagatcgcccggaacgtcgtccgagccctccaggtcaccctcagcccccgggaaaaaggggccttgggaaaaatctccacccggcacgtccaggcctacgattactatcttcgcggacgcggattctacaaccggtacaccaagcaggacatcgagttcgcatttcagcttttcacccgggccacggagctcgatgacagcttcgcctcggccttcgccggcctggccgattgctggtcgtacatctttctatactcggaaaggaaggaatcggtccgccgccaggccgaggaggccgcccgccgggccgtcgagctggacgccgaatccggccaagcccaggcgtcctacgccctggccctgtccctcggcggccggggcgaggaggcggtcgaccatttcgaaaaagccgtcgccctggagcccggcctgttcgagggctggtactattacgcccgccacagcttcgcccagggggagtatgaaaaggccatccgcctgtatgaacaagcctgccgcgtccggcccgacgattaccagtcccccctgctcatggcccagatctacgaggaagtcggccggccggaagacgcccgcaagtcgcgcctgcgcggaatcgagctggccgaatcccgtctcgagctgcacccggacgactcccgggcgctttacatgggcgccaacggcctcgtcgccctcggggaaaaggaacggggcctggaatgggcccgccgggcccgggccctcgcccccgacgattccatgctcctctacaacctgggatgcatctattcgctggccggcgattacgaagaggccatgtcctgcctcgaaaagtcgatcggcgtcggccggatgacccagaaagcctggtacgagcacgacagcaatctcgaccccctccgcggcctgccccggttcaaagagctgctggacagcttggaatagaagaccgggcggctttccatccgcgctgatcgaccggtcctcttcctttcgacgaggttccgttccttgcgttcccgaggatcatctcctgctcgggaagccggttccgaaaacggagccgcctcccttttccaatggcttcgccctctcccggccccggcttccaggggcatgcggccgcctcccaaagaaattccgaaatgaattcatccgcggacgcgcctgcccggggatccccggcctgaggaaccggcgattgaccgcacccggacgttctgatattttgtctccggcatgaggcgtgaacccgcggcccgcatcatcggaaaacggagctggggggattttcatcttctgcgtctcgaatccccggatttagccgccggggcttcccccgggcgattcctcatgatccggacctccgacggcttcgaccctcttctccgccggccgctcagcctccacgacgccggcgacgtctggatcgagctttttttccgggtcgccggacgcggaaccgccctcctggccgaaaaaaaagaaggcgaaaccatcgattgcctgggtcccctgggacggggattccggatggacggcttcgggaccggccgaaccgcctggctcatcggcgggggccggggcgtcgccccgctctattacctggcccggaccttgatttcgcggggagcgggggttcgggtcttctacggcggaaaaacttcggccgaaatccccctccgggagaaattcgaatccgccggaatccccctcgactgcgcgaccgacgacggatcgttcggcttcgccggcttcgtcaccgcgcttttggaacgggctctcgaaggcggccgccccgacgggctgttcgcttgcggacccgacgcgatgatgaagcggaccgggcggatggctctcgggctcggtcttcccgcccagttgtcgctggaagcggtcatgggctgcggattcggggcctgctggggctgcgtccaccgcatcaagaaggatgacggcggacaatggcgcaagatctgcgaggacggcccggtcttcggagcggacgagatcctctgggaggaagcctgatcatggccgatctcagcaccgacctcggctttctccggcttcggaaccccgtgctcacggcctcggggacgttcggctacgggacggaattcctgcccttcctggatcttgcggccgtcggcggaatcgtcgtcaaggggctttatttcgggccgcgggaaggcaatcccccgccgcgtctggtcgagaccgcttcgggcctgatcaacgccatcggcctgcagggcgttggagtcgaacggttcgccgccgacgtcctgcccgagctgcgccgccgcgacaccgcggtcatcgtcaatgtctgcgggtccggcgacgaggagtattaccgggtcatcgagtttctcgacggccacgaggggatcgccgcctacgagctgaacatttcctgccccaacgtcaagcggaacggggcttgtccggccatggatcctcgggcgacccgcgagatcgtcgccggggccaagcggcgcagtcgccggccggtgatcgccaagctgtcccccaacgtaaccgacatcgcctccatcgcccgggcggccgaggacggcggggcggacggcatctccctgatcaacaccctcctggccatggccgtggacctggacacccggaagccgaagctgggcaacgttctcggcgggctgagcggtccggcgatcaaaccggtcgccctccgcatgacctatcaagccgccagggcggtaaaaataccggtcatcgggatgggcggcatctgcaccgggcgcgacgccctggagttcatgctggttggggcccgggccgtccaggtcggaacggcgaatttcgtcgatccggcgtccgccgcccggatcgtccgcgaaatcggggactattgcgacgcccgaggcctggcccgggccgcggacatcgtcgggacgctcaagaccggcctctgagcccggtcttttcacggaaatccggccgccccggcgcaattcatctcccgatggattccccggacgcggaacggatataatagccgggcgaaaacgactccgaggagattccccatgaccccagccctcgccccgtctcaacgcatcatcaccgccctggacgtggaaaacaaggcccaggccatggctctcgttgatcaattgggacaagcctccctgttcaagatcggactggagcttttcaccgccgaagggccggctcttctccgggagatccaggcgctgggcaagggcatctttctcgatctcaagcttcacgacatccccaacaccgtcggggaggcggcccggatcggcgtccgcaacggcgcccggatgatgacgattcacgcctcgggaggcaaatcgatgatggcccgggccgcggaaacggcggtcgaggaagcggacaagcggggatttccccgaccggttcttctgggcgtgacgattctgaccagcctgcaaaacgaggacctggcctccgtcggcatggcaccggacacgtcggcccaggttctccgcctggccgccctggccagggccgcggggctctccggggtcgtctgttcggccaaggaaatcgagatcgtccggaaggaaaccggaccggaatttctgatcgtcacaccgggcatccgcccggccggcgcctccgctcaggatcagaaacgggtgatgacgccggccgaagcggtggcccgcgggtcggattatcttgtcatcgggaggccgatcacacaggcggcctctccggccgcggcgttcgcggccatcgtccgtgagctcgaagccggcttataaagccggggccgcccccaaggcgaacacgctgccgatgatcaggccgataacgagccagaggacgaccatgaccaccaagctgacgagaaaataagacatgactttttctttgggcgtctccatcatcggcgcttggaatccgaggtaaaggatatacaagccgtagagaccggccaggccgacaaggatgctgagcgcggggatgatgtacaacacgcccgcgatccaggacggagtcagggcatatacggcgagcttcatcgccgcttccatgttctgtttcgaagcaaaggacggcgccagggcgttgatgatcaacccggccacatacgcagccgccgcggtcagaacaaacgtcaggagagcccggacgatcgccgtcccgaacggaaggcggagattcccgaaaaagggcactcggactccgatcaggccgtaaccgataaactgggctgcggcgggaatcgcggccagggggatgacatattgcaggaagagggttttgacgggcgtcgattcgccctgaattttaatccactcctccttgggtttaagacaaatgccttgcactcgtgccatcaggttcatgactcctcctttccgttcagatcgcggaatccatcatatgcagatcggcagatggtgtcaatggaaaaggagcgggaaagaaaggcgcgggccggattcgaaccggcgaatcgaggttttgcagacctctcccttgccacttgggtaccgcgccgttgtcacgaggcccggtaacggcggatggagcgggcgatgggacttgaacccacggccttctgcatggcaagcagacgttctaccactgaactacgcccgcgcaacgtcggtttcccggcgaggaaaagccgggcaacacggcgataaactaacagaaactcgaaaacctgtcaatcgggcttcggctggacgagatcgccgctcaggatcgaatccttggaattgaggatcttgagcgtcgcccaccggggccccgtccaaacgacgacggagttgccgatcggccgcggcgttttatccgcttcctcccggtagaacgtcatctgcctgccgggagcgagtccctggtccgttccgatgtcgaccagcacccagtgtccccgagcgacgatatccgaccagccgctttcgatgaagacgacccggccggccggaacgccctcctcccggaagggaatgtcgtagctcgattccgctcccgtcaggatgtcccccttgatgtagggaacgaggagcaatccggtcgtgaccgctccgcaggacttgacgacttccatcaccgcccgaccggcctccatccgaagaacccgcgcccggccgcgtaggaagacggcgtttccgagcgggccggaggttctttccccccggactttcggtccccactccagaatggaccatagggatccctcggcgaaggattcaacgccgggaaccggatcgacgaggaattgatccccgtcggccagcagcgtccgctcgccgccctggaggggaacagagatccggagctgcggggccgtttccatgataaagggggaacaatccaaatccaccggactgatcagcttggggaccgccgcgtttttctcgaggacgtcctgggccggcccaagcccgggtccggcgatccccccgataaaaattccaaccgcggccgccgccgtgaatcgatgaaatcgcatcatgatccgacctttccgggctcgcgcccctgtcaacttatcttcattataacggcggcttttggggctgtcaacgcgccccggcggactttcggaatcgcttgacaatccggcatttccgtgcgtatgattcaatcaacggaaagcaagagaggaggtgcccctatgggcaagaaggaaatcttggcccggatgtcccgcgacggggggatcaccctggcccaggctcagaaagcatttgcttcactcctccgagggatgcgggattctctgaaagaggggaaaaagatcaatctttccggttttgggagcttcgagatcaaggtccgcgaagcccgcaagggacggaacccgaaaaccgggacgacgatccagattccccaaaaaaagagaatcaagttcaatccgagccgctcattcaagaacaccctctgaatcccgcctcgtagacaaacgcctcgcttttttttaagatgggggcggactgcccatgaaatctcccttaaccgtcgccctcttcttcggcggacgttccgcggaacacgaggtttcgatcacgtccgcccggaacgtctttgacaacctcgcccgctcccgctaccggcgccgctgcatctttatcgacaaaaacgggctctggagcgaagtctcctccccccacctgtccgcttcccggctcaaccgcgggccgtttcattcctttctcccttgggacaggagcgggcgggcgaagccgctgcgggccgacgtttactggccggtcctccacgggccgggaggggaggatggaacgatccaggggctcctcgagctagccgatgttcctttcgtcggatccgggacgctcggctcgtccatggggatggataagggggtcatgaaggaattgttccggtcccgggggattcccgtcgttccgcttgaagtcgtcacggagccggaggccgcccgctcgcccgcggccgtcgtccggcggatccgggccggattgaagccgccgctgttcgtcaagccggccaatctcggctcgagcgtcggcatcaccaaggtgaaaagctgggaggagttggtcccggccatggacgaggccttccgctacgaccggaagatcctggtcgagcaggggctcgactgccgggaattcgagtgcgcggtcctgggcaacgacaatcccgaagcctccctcctggccgagatcatccccggccccaataacgagttttacaactacgtcgaaaaatatctcgagaacgaaacccggttcgtgatcccggccgtcctgcccgaggccgtcgccgcccgggcccggcggctggccgtggccgcgttccaagcctgcgaatgctccggcatggcccgggtggactttttccgggacaagaaatcccagcggctctacgtcaacgagatcaacacgattcccggtttcacggcgatcagcatgtatccccggctttgggccgcctccggccttccgttccgggccttggccgaccggctcatcggcctggccctcgaacggcaccgccgcaagaaacgctgtctggactacgattcccgatgaggattctcggcgtcgactacggcgaccggcatatcggcctggccctgagcgaccccctcgggatgatcgcccagcccttggaaacctacaccctcaaggataaaaaagccgagaacgccgccttcttccgcggtcttgtccaaacccacgggatcgagcggatcgtcctcggtctgcctcttcggatggacggcacctccggtacccgggccgaaaaaacccaggtcttcgcccgctggcttgagcagaacaccggttgtccggtcgtcctctgggacgagcgcttgacgacccgccaggccaccgggatcatgcaggcccagagcgtccggatcgaaaaacggcgatccgtcgtcaaccagatcgccgccgtcctcatcctccaggcgtttctcgacggacaggccaacgatgcgccggattcgcctgtggcttgagatcgtcctcgtcgcggggatgatcggagttctcggcggaagcgcctggctcgcctgggaaagccggccgccggacggcgccggacgggagaccgtcctcttcgagatcgttccgggacagagcgtccgctccgtcgcccgatcgctggaggcccggggcctgatccggaaatccgagcccttcgtcgtcctctaccggttgcatcatgggaaggagaccatcaaggcgggcgaattcgccctcccggccggccgggggacgaaggagacgctggtaaccctcctgcggggaaaactctatcttcatccggtcaccgtggccgaagggctcaccgccggcgaaacgttcgatgtctttctcgccgcctcgttcggcgccagggacgccttcgaagcggggttccggaacaccgccgaaatcgccctgcttgacccgggcgcggccgatctggaaggatacctcttcccggaaacctatcacttccccaaaggagcggccgccgccgaaattctttcgagcatggtcgctcaattcaaaaacgtcttcggaccggaagagaggatccgggcggcggagatcgggatgactccgcgacaagtcgtcatcctggcttcgctgatcgaaaaagaaaccggccggcccgaggaaaagccgctggtctcggccgtcttccataaccgcctccggatcgggatgaagcttgaatgcgatccgacggtcatttacgcccttaagcgcgaggggaagtacaacgggcggctgctgaagaaggacttgcagttcgattccccctacaacacctaccggtatgccggcctgccgccgggcccgatctgcaatccgggcgaagcctccatcgaggccgccttggccccggccgcggcggattatctttttttcgtcgccgaccgcgaaagaggccatgtcttcagccggacattgagggatcatcaacgcgccgtccatgcctatcgaagaaaataatcggcccattcaggccggcggtgctgtggccgcgatcctttatccatctccttcagcagccgtcctctctttcagggatttcgtctgcgcatgagatgattcaatgcgcggatttgcatccgcatccggaatcctgatatatttgccggtccggcgggtttcctcccggagatctccggccgtccggcgatgtaacgaatatttacaataggaaacgcctaacgcagctggcggtgaagcgatctctggaattccgcttggcatgaacattgcagataaaattaggaagacaaatgataaattccttcagaggagaaacgatcccgatgaaaaaacatatcgctgctgttctctgcgccggtctcctgttcggcctcgccgccgcgtccggaatcgccgccaaggacgtcattcccaaggacataagaaaggcgatggaagccggcctggccgagagccagccgactcgaacggacatccccttcacgttcagggaaccgatcatcatgcccggcccgcagcaggccgtctatgcctatctcgtgatgaacatcaagaacgcggatctgggatacgccccgctcccgggaactcccaagctccaggccgagggccatgtctatgtccggctctacctcatcgaaaacggccgggccggcaaaatcgtcaacgaaaacgacatgccggcggctttcgaagtcgacccggacggatacgatcccgaggcctccgactggtacgcgttcggctatccgcttctggcgggggattacctggccgcgacggcccttgtctcggccgatggcgcccgggtaggcatccagtatagccgattttcgatccctgatccggccggattcaccgaccggctggatacatccaccattctcgtgatgaaaaacttcgagcgggttgagtcgcccgagccgccgcccgtcattcaccgggggcttttagcttggtccgtcgcccggatcaccccctgcctgtcgaagaccatcaaggtcggtcaaccgctcgatttcttcttttatgttttcggggtgcgtcccgacgacgccggtaagtgcaatctccaagtcgactttcaagtggacaaactgacccgcgaatccgatatcgacggggctaaaacgccgcttttcttaaaggactggagttgggagagaacgcccgagggcggctcgatcgaagcgaagggcgaattgaagaacatgaccggggaagccctgtccggcgtcgaagccgtcgtcaatttcttcgaccgggaaaataaatacatcagccacgccggctgccggatcgagcccgaaccgctcagcccggccgggacggcctcattccgtctcgttcagaaagacgatccgctcatcgaaaatgcgacggtcgatttcaaaaatgcggccggcgacgtcatcgccaaggcttcgctcatcgaaacggccctccgcttcgacacccaaacgttccaatcgccgctgatcagcctgcctcttcccctcaaacaaacgtttgaagtccggacgggcgacaaggtggaatacaagaaggaggatctctcccgcggtcgctatgtcctgatcattcggatgctcgacaagatgtccggcctcaaaggcgagaaaaaaatcgagttcacggtcgaataatccgttccggcgcgattcggggcgaaaaaaatccgggccggccgcccttgccatcggccggcttgttttttacactggacggcggcatgcgtttcctcgccgacctgcacgttcattcaccgttttccctggccacctccggggacatgaccttcgacaccctggccgcctgggcgaaaatcaagggcctcgccctcgtcgggacgggggacttcacccacccggaatggagccgccggatccggcgggagctcgagcccgccggaaacggctttttccggctgaaaaaagcaaagccgccagccggcggccttcccgacggcttcaggccggcacccggcgacgtccacttcatcctctccgcggaattgagcttcatttattcccagggcggccgggtccgaaaaatccatctcgttgtgctcgcccccggtctcgcggcggttgaacgcctcaaccggcgcctgggccggatcgggaatatccggtccaacggccggcccatcctcgggcttgatgccgcttccttctgccggatcgtagccgacgtcgatcccggatgtctcgtcattcccgcccacgtctggacgccctggttttcgcttttcggctcccgatcgggcttcgattccgtcgaggaatgcttcggcgacatgaccccgttcatcgccgccctcgagacgggcctttcggccgatccgcggatgatccgccgcgtctccgccctggaccggttcacggccgtatccaattccgacgcccattccccggccaagctcggccgcgaagccaacgcctttgagacggaattcagttacgcgggcctggcggaggcgattcgcggcggcgacccgcgccggttcctctataccgtcgagcttttcccggaggaagggaagtattacgccgacggtcaccggaaatgcggggtcgtcctccgtccggaggaatcgccgaagcggatgaatccctgccccgtctgcggcaaaatcctgacgcccggcgtcggccgccgggtcggcgagctggccgaccgcccggagcggccgaaggcggcggcgagcctggtcccggcgcttcacttggtccccttggaggagatcatcgccgaagccgcgggctttaggccgggcgggcgtccgggccgggcgctttacttctccctgatccgggagtttggaaacgagcatcgaattctgacggaagtccctccggccgagatcgggcgggccgcgcccggtcgtctcgccgccggaatcgagcgggtccgccggagccgggtgacggtttcgccggggtacgacggaacgtacggaagaataaggattttcgaccgctccctttgagaaaaatcggcgccgttccttgacttccgagctcccggattttatatttttaatctaggagtcatcgttggcgatcaaaatgcggatcaagggtctggtcatcgaccccatatccaagatgcccatcgtcgtcctccaggacccgacgagcgagcgcatccttcccatctggatcggggtcttcgaagccaacgccatcgctcttaaaatcgagaacatcgccacgccccggcccatgacccacgacctgatgaccaaccttctcgaacggctgtccgtggccgtcgaacgggtgacgatcagcgacatccggaacaacacattctacgcggtcatccggtgccgccgcggcggcgaggacctggtcatcgactcccggccttcggacgcgatcgccttggctctcaggaccgacgccccgatttacgtcgaggaagacgtcgtcctccgggcccagagcctcaccctggatccgtcgctcgaaaacccggagaacctgcgccggtggctcgagacgcttccccccgaggatttcggaaaataccggatgtaaggggccggtcgagcccgccttttccctcccgccggccggcggaagccgtcaagttttcagtcgaagcatcaaataaagccccaagagcccgaacatcaaggccggcccccaggcggctaaaaagacgggcaggattcccacgccccccagactcttgaagatgccgatggtcgtccagaaaacgagggcgatccccaggctgacgccgatcccgacaagggcgccgcgcttgcccatggcgaaggcgaacgggatgccgagcagggtcatgatgacggcgacgaagggaaacgagatcttcgaagcccggtccaccttcagacgagtggtgttgaagcccgtctgctccacttcctcgatataacggccgagctccgcgaatttcatcgccgacggatccttggagacgcttaaaaagagggcccggccctcggggacgtcgatggcctcggcgtcgaaaaagaccgggtcgggcggacgggagccgccggcaccgggaaattcccggagccagccgttctccaggaccagggtcttgtcgatcaggcgagccccggccgcgaacatccgccttttcagggtccagcgggcgtggtcgatctcgaaaatccagacctttcggaaggtcatgtcggccggattcacgtaatcgtatttgaaaaaacggtcccgggcccggttggccttccaggcgaaaccctgcgtttcggccgacggcggagagacatcgttgatttcgttccagactttggccgctttctggctttcccccggcaggacgttttcctggatgaagaacgacaggccgccgatggccgccgccaggacgaaagccgggataaacatccggaagacgctcacgccgcaggccttcatcgccgtgatctcgttgaacttgtggaaaaggccaagggtgagaagggtggccatcagggtggtcatcggcaggcccagctggaagaattccgggaggcggtgggaaatgtaattcaccagcatcaggaccggcttctcgtgggaatagacattgtccaaacggtcgaaaaacgtcacgatgcagaagatcgagacgacactgacaaggatcaggccgccgatccagagataccggcggaagaaatagcggtccaggatgttcgggaaaggaaggcggaggagcagcccccggatcagcccgcggaggcgggaggactccttctcctcgcgcgcagccgccggagcgggggcgccggccataagggccggcagcgggcgctgaacccatttgatgagaagcggccgctcgcgggctgagcgaataaaaaggatcaggctggccgcgccgaagacgatgtttcctccccatacccccagccatggttctacgcggccgtcgagggccaagcgttctccgaacgtgaggaagacgtaatatgccagaatgatcacaaggctgatcgtgaagccgctcgtccggccgcctttcctcgtcgagagtcccaggggcaggccgagaaagacgaaaatcaagcagacgaacgggagggcgaagcgtttgtggctttccacccgcagggaccggatgttggaattcttgtgccggacggcgatctcattcttgaggacgaggggatttctcggcggaaggccgcggccggccagggaagccttctccttcaggagatcgtccagctccgcccgggcggcggcaaggccggcccgcagctcgaggatattctgctcccgggcccgcttctcggagctgaaggcgttggccagccccgaaaagtcgatttcctgctccatgtgggccgaatcgacccgctcatagtactccggcttgtcgccgaggctcgagtgctggacggcgccgaacagttcgacggtcgcccgtttggagtccggataataattcagccggccgcggtccgccaggacgacccgggattccagcgggccggcgttgaaggaaatgaacgcttttctccagtcccctccgcgttcgatgtcatccaggtagagggctagcccggggatggtggcgttgaattcccggggattgacccggatctgggccttgtcgagggcggccttgacggtcgtctgcagccagaggtaattgaacttcggggtcacatagagggtcaggacggatgtggccgcccagccgcacagggcgaacaaaaacagcggccgggtcatccgggcatggctgacgcccaggactttcagggccgtggattccgaatccgaggacatccggccgagcccggccaaaaagcccatgatgacggccatcggaatggtgaaggccaggatggccggaacgagatacaggaggagcttggtcgaatcgccgaaagagactccctgggagatgaacagctcgggatactggagaatctggttggccatcaggacgaagctgtagacgaggagtccgagggcgaagggagacaggatttcccggaggaaataacgatcgatgattttcaggcggaatgccccccctcgtccggtcttggaccgcttccggccgggggacgcctgattttccacgggccttatcatagcagaaagagcgggcggggcgtaaaaaaaaggggagcggccgttcggccgctccccgggtcgttttccgggaaaggggcggaggccccgctcccctgaaaaagccttagtacatgtcgccgccgggaggagtcggatacgcgggtttcttgtcctcttccggcatctcggtgatcaggccggcggtcgtcagcatcaggccggcgatcgaggccgcgttctgcagggcgatccggacgaccttcgtcggatcgaggatgcccgccttgatcatatcctcgtacttctcggacagggcgttgaagccgaagtcgggcttggcctcgcggaccttctcgacgacgaccgagccctcgagcccggcgttgttcgcgatctggcggaggggctcctcgatggcccgcttgatgatgtctgtgccgatcttgagatcgccttccagcttgagattgtcgagggccttctgggaccggagcagggccacgccgccgccgggaacgatgccttcctcgacggccgccttggtggcgtgcatggcgtcctcgacccgggacttcttctccttgagctcggtctcggtggccgcgccgaccttgatcagggcgacgccgccgaccatcttggccagccgctcctggagcttctcccggtcgtaatcggaggtggtgtcgtcgatctgggtgcggatctgcttgatccgggcctggatgtcggccgccttgcccttgccctcgacgatcgtggtgttatccttgtcgatgacgaccttcttcgcttcgccgagccaggcgatgtcgaccttttcgagcttgacgccgatgtcctcggtgatgacccggccgcccgtcagaatggcgatgtcctcgagcatggctttgcggcggtcgccgaagccgggggccttgacggcggcgcacatgaaggtgcccttgagcttgttgacgacgagggtggccagggcttcgccctcgacttcctcggcgatgacaacgagcggtttgccgacgcgggcgacgctttcgagcagcggcaggagctcgcggaggttggagattttcttctcgtgaagaagaatcaaggcgttctcgaggacgcactccatccggtcgggatcggtgatgaagtagggggacaggtagccgcggtcgaactgcatcccctcgacgatgtccagggccgtttccatgctcttggcttcctcgacggtgatgacgccgtccttgccgaccttgtccatcgcctcggcgatgatcttgccgatggattcgtcgttgttggcggaaatggctccgacctgggcgatcatatcgccggagacctcgcggctgatcttcttcagctcggcgacgacggcttcgacggcccggtcgatgcccttcttgatcagggtcgggttggccccggccgtgacgtaacggaggccctcgccgtagatggactgggccaagacggtggcggtcgtggtgccgtcgccggccacatccgacgtcttggacgccacttccttcaccaactgggcgcccatgttctcataagcgtccttgatctcgacttccttggccacggtcacgccgtccttggtgcttgtgggggagccgaacttcttgtcgatgacgacgttcttgccccgggggccgagggtcgccttgaccaggttgctcagggtgttgacgcccttgagcatcgaatgccgggcttcgtcgcccattaaaatttgtttggccatgtgtgttctccttggatttgcgccgaatcaggcgaggaccgccaggatctcttcttcgcgcaggatgatgtgctcttcgccgtcgatcgtcacttcggttccggcatacttgccgatgagaaccttgtcgccggccttcaccgtgaggggaatcactttgccttcatcggtcgtccgccccttgccgacggcgatgacttccgcctcttggggcttttccttggccgaatccgggataatgatgccgcctctcttgacttccttttcctcgatccgcttcagaagaacgcggtcgtacaacggggaaatcttcatcaaaaacctccttgaaaagtgtaaattagcaatctcaaaatgagactgctaatttacaactcggaatggtcgttgtcaagaggaaaaatgaaaaaattagcagacttgagcgttggctgctaaattttcttgattttcaaggtttttgctttattgtggagcgtattccggtggaggcccaacgatttggccatcaacgtcttgttccccctgtatttccgaagggccgtttcgagatagattttctgaaattccttcagggcgtcgcggtaccggacttccttctcgaccatatccttaatcaggatctccatcttctgatggatcgtcatctcgtcaaatttcttgtccatggctcttctcggttttaaaaatcgtctggtatgcgctccgagccgcgtttttgagctccgcgggaatcagggcggcggctgctttcgtcagcccatagcaatacggcgccagcctcgactcggacaccgccgtccggtcgaccggaaacacgaggagggcaaagaccaggacccctccgatcaaaatcccttccaggcagccgaatacgccgcccatcaggtgatcaagaacccggagcgtccccttcatcagcttcgagacgaggaacgtaacgagcgccccggccaggacgacaagcacgaaaatgaggagaaatcctaaaaatcgagcggccaaggggccgcggacgagcccgcccagcaggtcggccgccttctggtagtggtaggccgccaagatgaatccgccgacgaccgcggccaggccgatgagttcccggagcagccccttgatcaagccgatgacgacggccgcgatgatgatgaccgcaaggacgatatccaaccatccgatcatctcgacggtctcctttcccggagcgcctcgaccatctcgtatcccccctcccggatggagccgaacgagacatgcggtttcacccggccgtgaaaatccgacccggctgtcgggaccaagtcgaacgcttttgcttcttcgagataaaaccggacttggccggcgtcgtgataggacgtgtagacctcgaggccggccaggccggcgtccttcagcacgaccaggtcctcatgcgtcgttctctggaaataggcccccgggtgggacaaaacggcgaccgctccgatccgggcggcttcgtccacgacctcgagaagcgggatgtgccgcttcggaacgtaagccggcgcgccgtcgaggaaaaaatcccggtaaaaaaacgacggaggcagcggccgtccgccctcatcataatatctgcgcagccgggagtcgcggcgcgattccggcttatcgaggagaatgcgggcgatggtcacgccgaggggagccacgtccggggacgccgccgtcacttcctcccaggagatcccgatccccagcgaccggaggttggcgatcctccggcgggcttcctcccagcgcagttcggcgactcgcttcacgatcgcggcgacgcgggggctgtcccaggcgaggaacgggagctggcagtgaaactcccggtcgtcgtacatcgccgtgacttccatgttcgggatgatttccacgccttcccggcgccccgcctcgagggcgtcgggataagcggcgacgttgtcgtgatcggcgatggcgatcgcgacgaatccggtgtcggcggccatccgggccagcgcgtccggcgaaaaatcaccgtcgctcgaccggtccgagtggatgtgaaggtcgacaaaaccggatttcacaggtcggttttctccgaaagaaggcggtagatctccaggtatttttgggacgtcttagcgatgatatcggccgggagaaccggcggatcggacgtcttgtcccaaccggtcgtctccaggtaatcgcgaacgaactgcttgtccagcgacggctggccccggcccggctcgtaggaggccagcggccaaaaccgcgaggaatccggagtgaagatctcgtcgatgagcacgagatcgtcgccgtccaagccgaactcgaatttcgtgtcggcgatgatgatgcccttggaaagagcgcggagcgtcgccttgttgtagagttccaggctgaccttgcggatcttcttggccaggacggacccggtgattttctccatttccttgaaggaaatgttttcgtcgtggccgacctcggccttggtcgagggggtgaacagcggctccggaagctgatccgattcccgcagaccgtcggaaagcttgattccgcagaccttgcccgacgcccggtattccttccagcccgatccggccaggtagccccggacgacgcattcgaccgggagaaccttcgtcttgcggacgagcatcgcccgcttgtcgagaagatccgcgtattcggcaagggcggggggaaaggcggcgacgtcggccgcgatcatgtgattgggacagacgagcgacgtatattcgaaccagaagcgggaaagctgggtcagaacccggcccttgtccggaatcaacgacggcagaacgaagtcgaaggccgaaatccggtcggtggcgacgatcaggagcttgtcgtcgagttcatagacgtcgcggaccttgccttttttataaagacgaagttccgggagaatgacatcggcaaagggttggttcatggtgctttttcctgatcgttaccgatctcgatgcagcggccatcatacctaaaagaaagaagcgattcaactgcacggggggagtgataataacgatcaatttgatcgagacgctttcacgtcctcgggcccgtcgacttcgattcccgcgttccggatccggcggatcctaacgaaaaatcgcggcgtcggcgggaaccccgaggttctctcaacaaccgtccgcctcttcggagcgaatcgcgccctcctccgtcgaccgcctcagccgtcccggcctccctcgccgccggcgattttcatttcctggatatgacccccttttttcttcccgcttcggaagaggcggcggacaaaaggcgatccgcggcatgatcaaacgagttgtcttaatggtttgacgatttccgaagaggaccgtcgccgggaaaacggcggagaatcttttgtgatcaggaagaaaggccgatgaaggaaaacatccggcgggacgcgtcgcggtcgcggcggaaggaatgcatcctcgggtcgcaatgggtgcatccggaatcgccggcgggcgcgatctcggaaacaccggccgcgcgcaaaagcgaggcgttggcctccgccaaatccagaaaatgcttgcccggacggccggcgggggcgaagacggagcccggcagcccggccgaaagaaactccgagcggacctcctccccgacctcgtagcacgaggccccgatgccgggacccagggcggcgatgacgtccgccgggtccgtcccgaaccggccggccatcgcccgaacggttttctcgacgatccgaaggcgcgtcccccgccagcccgcgtgaaccgcggccacgacccggagccggaagtccgccaggagcacagggagacaatcggccgtcttgacggccaaaagcaggccgggggcattcgtcgccagggcgtcgcccggcaagcggccggccggcgcttcttcaatgatatgaataatatccgagtgaatttgatcgagaaggacaagccgtaacccccgtccgagggcaaacgtccggaggctttcctcggtgagatccccccgcccgaagccgtggacaaggccggggatccgggacaagcgctcgtcgatcgaaaacaacatggaagcggactcattatatccgattttattgacttttcctcgcggaccggtataatcttggactttcccgagacgggaggaggtgaatccccagtggccttcgtagttatcgatgaaggcgaaccgatcgagagcgccctcaagcgtttcaagcggaaagtgcagcaggaagcgatcatcaaggaaatcaagaagcactccgtctattacaagcccggagaacgcaaacgcatgaaagaggcgatggctcggaaacggatgcgccgtcgcatgaaacgcgacaaagatctcgaatattgacggtttcagatcctccccgccccccggcgtccccgaagccggcctggctcaaggtcaggcttccggacgatgaggcttacttcgccgtctccgccctgcttgacaagcgcggcctccacaccatctgccggagcgcccgctgtccgaacatcagcgagtgctgggcccagaagacggccacgttcctcatcctcgggaacgtctgcacccgggcttgcgccttctgcgcggtgacgaagggacgcccggaggcgcccgagatctccgagcccgaacggatcgccgaggcggcctccctcctcgggctgacttacgccgtcgtcacctcggtcacgcgcgacgaccttccggacggcggggccgcccatttcgccgcgaccatcgccgctcttcggcggcggattcccgggatccgggtcgaggccttgattcccgatttcggcgggaacccgaacgccctggacatcgttttggccgtttcccccgaaatcctcaaccacaacctcgaaacgaccgagtccctctacccggcgatcggccgtccggcgtctggataccgccgatcgctcgaggtcctgcgccgggccaaggaacgcggatttacgacgaagtcgggcctgatgatcgggctcggcgaaacgcgggacgatttgctgaaaaccttccgcgacctccgccaagccggttgcgacctcctgaccatcggccagtatcttcggccgtctcccgcccacgccccggtggtccgctactacccgcccgaggaattcgccggtctcaaaaccctggcctcggccgaaggattccccggcgtcgaggccggcccgcttgtccgcagctcctaccacgcccagacccttcaggcttcgttcgagcggggccgcggagacgccgcatgcgcgccctgatcttcagcgacgtccacggcaacctcgaagccctgaccgccgtcttgaaatacgccaagcgtcaccggatcgaccaatacatttgcctcggcgatcttgtcggctacggggcctcgcccaacgaaaccatccagaagatccaggcgctcaagccgctcaccgtcatccgggggaaccacgacaaggcggtcgccggccaggactcgatggagacgttcaatcccatcgccgcggccgcgatccaatggaccaagtcccggattctcaagaaaaacctggaattcctcgcccgcctcccgaagggtccgctgacgatcgacaaaatcgaaatctgccacggcgcccccttcgacgaggatttctacatcttcggggaatatgacgcgatcgaagcgtttgaataccttccgttccccctgtcgtttttcggccacacccatttccccgtcatctactccaagcatggagatcaggtcgccggccggttcctttccggccccgtcaacctgctgaagatcgaaaagggcttctcctatctcatcaatccgggatcggtgggccagccgcgcgaccgcaatccccgggccgcgttcgctatctacgacacggagcgcctccaggtccgtttccaccgggtggagtacgagatcgccgaggcccagaaaaaaatcctccaagccgagctccccgccgccctggcggagcggctcaccctcgggctctgaccgatgtcccgcctcgaagcccgccgcctggtcaagcggtacggccggcggatcgtggtcaaaggcgtggacgcggttttcgagtccggcgagatcgtcggcctgctgggccgcaacggagcgggaaaaacgaccttcttccagatgatcgtcggcctgcttcgccccgacgcgggggccgtctatctggacggcgaaaacatgacctctctcccgacggaccggagggcgcgggcgggattgacctaccttccccaggagaactccgtttttctcaaagcctcggtcatcgacaatctccggctcggcctggaactgcagccgttgtcgcgggccgagcgggaggcgacggcggccgcgcttctcgaggaattcaacctctccccgctggccgcccaaggggccgacagcctgtccggcggagagcgccgccggctcgagatctgccgggccctccttctccagccgaagttccttcttctcgacgagccgttcaccggaatcgatccgctgaccatccgcgagatccaaaaaacgctcctccgcctgaaggagcggggcatcgggatcatcctctcggaccacaacgtccgggacacgttccagatcgtcgaccgggcttacctcatcgacgacggggagatcctggtgatggacacacccgcccggctggccgcgaacccgaaggccagggaacggtttctcgggacggaattccggttcggcgaagagcgggcccccggcgcttaattccggggcgtcaccagccgccctccgggcgtctctcccaaaaacaaaaggaagaggaaaagatacaccccgagtaggacggcgtagaggatcgccagcggtccggcggccgtggcgatcaggtcgagaaccggcgtcgacatgaaatgggcggccaggacggtcgcgaccacccagaaaagcccgacgaccagcaggtcgaaaatcgtcgctttgatccgccggaaaaatcccagccggacgaccggcgcgcgcgcgggcgccttcgcttccccgatttccgggacggcgggggcctgttcggattccttctctcccgcttcctcgagaaaggatccgccccgggattcttcctcgacctcaacggcgggggattccggacgacgattttccggaatttcgggctgtcggcgcggagcgatcgcctcgagctcccgctcgatctcgtcctcagagaccgggatttcaaaagacaggggcggcgagacggaaggcaccgactccggcaaccctatcgtcgaaagcggcgcgaatgcctcttccgtatcgaagagtttttcctccggctttccctcaggcgccggaggaaaaaacgtttccagggcgactgaagtcttgcccgattcccagtccggctcggccgtttcccgtaccgggcccgaacggagggcctcctccccggtctgaagaaacccggacatctcggccggcttttcgccggcggtttccgcctcggcgacggctgcttccccggggacaagaccggcgtcctccgccgcttccgcggcgacgtcttcgacgcttcgctcctcgatgatgagatccttttccacgagaggcggactcggcggcttcggcggtccgatttcctcttcaagatccctcgtggtaaaaacggggtgccgcgtgccgtcatccgcctccaagccggcggtcagcccctcggcgatcgcttttttcaagcttccggccaggaacggcagacggtcatcggttgaagacggctcctcctccggcgtctcctcggccgggggagccgaggcttcgtccggacagccgaattcgtattccgcggcggaatcccccgccggctccgcccggggcgcttcgacttccttttcgatctgtccgccggccggcggagcgccgacttccgccctccttggagggacgaccggctcctcggcggcttctcctccccttgaagcccggtcatcggccgcctcggccccgcgctcggcagcatagtcccgccaccgcttctcaaaatcggcgatcagtccggtgatttcggatttcgcgtcgcgatcccgcccgcccgggagaacccggaaagcggcgccggcggctttcgtcctgagctccaaggtaaagtcgcgccactgccgttcgaaatcggcgatcaggcgggtgatttcgattttcgagtcccgatccttcccgcccgagggaatccgggaaagggcatccgccgcctccgtcccgatctccgatgaaacgtcgcgccactgccgctcgaagtcggcgatcaggcgggtgatttcgatttccgtgtcgcggtccttcccgcccgagggaatccgggaggggccgccggccgcctccgtcccgatctccgtggtgaagtcgcgccaccgcttctcgaaatcggcgatcaagcgggtgatttcggatttcgcgtcgcgccccctccgtcccgacggaatccgggggaaggcctcggccgcctcgatcccgagctcggccgtataattgcgccgccgctgctcaaaatcggcgatcagccgggcgatttcgaatttggtgtcgtggtccctccggcccggcggaatccgggagaggtcgacgctcttctccttggccgaggccgattttttcgaaaggaacgacggatgggagggcatggggatctcaagctcgcccgtttcgaatttcagggggaacttgatttcgttctcggaaaaaccgcccgtcgcgtccgtctccagcttgatgacaggcgtcttcccgggaaccgctcgggggaggctttcctcgggttcggcttcccgcaaatcaacgaaagattgatcctcggcggccgcctcgtcctcgatttcctcttctccctcgatgaccttttcaaggtcgatttcccgccgctcctcgcccggctccgcgtcgagatcaacctcgtccctcggctcgtcgatgagctcgggaggctcatcgaggccgcccgtttcgggaaagtcctcgtcgacgattttctcccccttgatgggctcctcgccctcctcgtcggagaaaagaagctgggttccgcagttattgcagtatttctgcgactcgtcgatgattgccttgcaataaggacagcgcctgacggccattaagcaaattcctacgatatttataaagggattaaggaaggatgtcaacgttccaccggggacggaagaagggccgggatcaggagaaaatgaggcaaaatcgcggcgaagggagcggagggaaacgaggcggcccgggggaaaatagcggaaacggcccggatcaggggaaattgactttcgagggcgattggccgaaaatatgacccgctgggcgattaactcagtggctagagtactaccttcacacggtaggagtcggaggttcgaatcctctatcgcccatttttttcatcgacgttgtcttcttttgcaagctttatcttcgtggatcgccgtcgtgaacgcggggcagtgatatccaaaccatcctgaaacggctttgttgatatcgcccgcggaggcctttccgaaaagaaatcctgttacttcttttccaactggagaagaatctctcggatttccggctgctccgcccgaagcctgagcgaggccgttaaaactttgacggcttcctcttttgctcccgtccggatcatagacaggcccagggcattcaacgtgtcgacgtcgctgtcgtatctcttgttcgcttcaagaaggttttcgacggcggcgtgatattcctgtttgcggtaaagcgcgcgtcctttcaagctgaaataggaaaaagcttcctccggccgggactcgagggcttcgaccgcggccaggagatcgtcatatcggccctgcttccagagaaaggcggcataggctttgacggcatcggccggcaccggctgccggtccagggcggttcgatacgcggcatcggcctgggacgccgagccgatttcgtcgtattccttcgccaggagaacatagtaataagacgcgtccttgtctttgacgatcttggagacgacaggagcatgaggaatctcggcatgaggcgcgatttgaaaaattttctgccggacgtggaggaccgtatcgtccggtcccatgatcttccctctcaaagcgtagtctccggtggggagagggtccagggttttcgggaaaaagaagtaggggtcgtctgaagggagaaggacggcgtactccttgaaaaaaggcttttcggggttcaagctttcgacttcgatcctgatccgaaggtcccctttagcctcccggcgttcgaccaggaaatacggcgtgatgacgtctttgagtccaaagacctgtttgggctcgatcttcacgctccggcccatgatcctgaagggggcatagccgtcggtttgctcagcgccttgaccgtaggagatgagcggatcggagatccggggaagggccggattcccttcgacgattttgatcgatcgctccatgaagccgatttcatcattgacggaattgcggaggatcgccatgagcttgtattcgccttcgacgacagggaagcggtcggcgatgatgactccctgggagaagagcccgtccagctcggcctgggtcatgtaaacggggaagtctttatcgtactggaggatgaagcggtcgtcctttttcagggtgacgaccagattgaaattgaaataataccggccgtccgcgagacgctcgacggagagacgcccgggctgcagagccagatggacgaaattcaagggcaggcgcggatccttaaggatgaccacgtcgctggtcatttcgacataattcgtggtggcgctggtttcgacgaatcccttgaaactcaggaagttcgtggcataggaagaattgatgtttaaagtcggcagatcgccgatccgcgccagcaggatctggtcctggagggaagggctgaacatgcgggactgattcccgggaatcagattcagggcgatttccgcaaccgtcgaatcgatctcctggattttggagagaatggccgcgttatcggcggggtcgatttgggcttccggattggacagcagcgcgtatggaccgtcgacggcgggaacgtagagccggtagtcgtcggcctcggagcgcttgtaaaacacgatccggaacatcgtcggcaatccctgatccggatcgcccatgtattcccagatttccacgggccgcaatccgttggtcaaaacatcaactttattcagtggcggtcccagaagaatgtaatattttccccggtccgttttccagccgggccgcgaggatccgatgaagtaccggttcgcgtgctggaaccgtttgagatgctcctctttgtattcattttgtggggtccccttggacgggtcccgcagattccagaagaggttgatgaaggaattccgttcccggtcgctggtcaaacggaaaaagacgtccttttccgtcggagtgatgatgtaggagaccaggtcgatccattcccggtagaccgccgccggttttgaggcatccgcctgcggggaaacggcaaccgccggcgccggaaaacggaatccgaacatgaccagaacgagcgccggaccgaggccgcgcggacggtttttcatgaaaacaaaataacacactccacgctctttcctcaacgggcgccgccctcgtttgagaacgggaacccaatttgataacatggaatcttcagaaaaacgctttggaatgaaggtgaccatcatgaaaagaaccctggcggtgctgtttacggtcgtcctcgccgcggcaggcgtttcttccctttccgggcaagaaggccagggaacgggaagggtcagggggaccgtcacggacgaagagaatcgccccctggccgatgtgaaaatcctcatgaaatcgaccagctatcattttcaaagagaaaccctcagcaatcaaaagggtaaatgggcgatgatgggattctccaaggacgttttcgatttcaccttttccaaggagggttacgagaccggccgggcccaggtttttctctctggagcgaaccgcaatccggatcaggacatcgtcctgaaaaaaatcgagcaacgccccattcagggactggacaatccggcggatcgcgaaacgatccggaaagcgtccgattttttcgaggcgggccaatacgaggaagccatgtccttgttcaaggaattcgtcgagagtcaccccgacctctacctcgcccgggtcaatctggctaaaaccctggccaagctcaaacagtatccggaggcgatcgccgaatatcaaaaagtcgaggaagctttgaacgcggatccggccgccgcccaagtcgaggcgagattggcggatatttacgtggccatggccgagacctatcaggatcaaggtcttttcgatcaaacctgcgcctattacctgaaggccatcgaattgacgccgcccgttgatccggccgtcccctttaatctggccgagcttcttttcagcaaccagcgcgtggacgaggccatccgctattaccagctcgcgattcagctgaagccggatttcggcctttatgagctgaaattgggctatgcttttctcaaccagggcgagatgtcttccgccgcggagcatctgaaaaaatttctagccctatcgccggacgatcctcaagccgattccgtgaggaaaattctcgagacgatcaaataaaagacgatccctctccgccggatcttgggggatctcttcaagatctatacgcttatacgctgacggaagcatcttccgacatcaaaagtcatcggttcgtgaggccaccgagcagccggacgatattcaaaattttgaatattatacaaatttttgaatccgcatttatcattttaactttttcatctttattatcttattgatattaaattaattaatatttattaagcatttctggtatttggcacaatatatgctatatattgcgtgtaatatatctacgtgatatatcgaagcaggaaaaacttgttagtattgtctgaagaggggccccaaatggagtcaaggccggcctgttcggccgaaagaggtcgttcttttggccctaaattttggaggaatttctccctcggaaaaactcgacattgagtttcttaatgacaagaccgttaaaaacagccacgaaaggctaccggttttctaaaggcaacacaaaaatctctaatgccatatttttcaaggaggttgagatgaaaaagtgtttcgctgtccttgccctggcctttcttgccgtttcgttcggattcggccagatcggccaaacgggacaaatcaccgtcacggtcgtcgataaagacggcgttccgcttggcggcgttacggtgaccatcacgtctccggacatggtcgtggcgagaatggaccgggtgaccaaccccagcggcgtcgccaggtttccctcattgaatcccgggacatacgaaattaaatgcgaaatcacgggattcaacacgacggtcaggaaagacatcattgtgaatgcgggcattacgtcggccatcgatgtcgatatggccgaagccgcgatcggcgaggaagtcgtcgtcgtcggcctctccccgactgtcgacaggcaaagcacgaccaagacgtcgactctcgacacgaatttcgtggcgaacattccggcgtccagggacctcgacacgttgttcaacatgacgcctggagtgacggcgggcacggcccacggctccacggtccgggacaacgcctattccgtcgacggcgtcaacgtcacggactcgacgatcggcatgttggccaatgacttcagcctgaacattgccgaagaagtctcgattcaaagcggcggattgtcggccgaatacggccaggtcagaggagccgtcgtcaacgtcgtcagcaagtccggcggaaacgaattccacggcaaagtggatctgttttaccgggggaaaaatttccaatccaacaacacgaatggaacgcccctcgagggacaaatcagcggcttcgattatgaaatcgagccgggcctcagcctcggcggcccgatcatcagggacaagctttggtttttcgccaacgtcagttttttccaaagccgttcttacgtggccggtttcccttacgatactcccggcaaacaagtccccgtcggcgatacgaggccgtatccttatctcaagctgaccttccagccgaatcaagacaacaagttcgtcatttcctacgggtattccgacagcctcaacaagaacggatatgcctccatgtatgacacggaggcgacgacgatggatatctcgacgcatacccacatcatcaacgctctttacacccatttcttcagctccaacgtcttcctgaacgtgagagcttcggcctggatatccggattgttccggtttgccaaaacgcagactcccgccttctgggaatatgcgacataccggaattccggaagcgccggatgggatgacgacaatccgagaaggcacgtttccgtggaagccaacggcacgacgttcctcgaggatttcgccggatcccacgaattgaaattcggggtttcgtttagaagggccatcgaaatccgtgaatgcacgatgcacgaggtgcccgggacgatgtggtctttcatcagtaccaacaacggagacccctactatgcctatttctatgatgacatccggtgggtgaacgtcctgcgcgactatggattctacgtcaacgacacctggaatccgataaagaacctgacggtgaatctcggcttgagattcgacatcaaccaaggcctgtggccgccgcagaacgaggacgaggactattaccagttgcctttcgagggggcccttaaagtcgaccggagcatcaaagagacgatgacggtctataactgggtgaacctttccccccggatcggcttttcctatgacattttcggcgacggcaagacgttcctgaaagggagctttgcgaaatacacccggggcaatatcaacacgtgggccggccgcggaaatcccaacgcctggacgtatttcggggcttatatcaatccggattattcgttgtacgccgtcgactgggtccaatacgcggggaaggagctcgcccctcaatacggatacaaggactatgatctgaagtccccgtacacgaatgaattcaccctcggcgtcgaacgggagctgttcccggactggtccgtcggtgtcaggtacatcgccaagaaggaaaagaacatcatcgacgacgcggactccaacgcgctggacctcgacaagctcctggcgaacggagaaatggactggatcggctatgagcccgtcaccgcggtggatccgtacaacggcgcctccgtgacgttctacaacaggctgccccaagccgacgtgtctcgaatttatctcatcaatccgcccaacgctaaaacgaattactccggcgtggaagtgacgctcgacaagagatattccaataattggcaggtgcacgcttcctacacgtacgccaagtcgtcgggcctggtggccaccgatttcagcgccacctcggcctgggggacgggattgtatcagaatccgaacgcccatactaacgccgagggacggttcccttatgagagacggcaccagttgaaggtctcggcgacggtgaaaatccccttcggaatcaatctcggcacgtacacgaggtttttgtcgggccaacggtatactcggaccatcagcgcccggagaatcggcctgttaacccttcgccagtgggacgagacgatttacgccgagacgctcggttcccggggcttgccggctctgttcatctgcgatttgagagccgagaaagaattcaagctcgggaaaatcaccatcggcctgttcggggaagtcttcaatttgttcaacgtcaacaaagcgacggcggttttcacggactccagcaatccctattacccgtttgagcagatgtcggcgattcaagacccgcggatctttagaatcggcgcccggttcgagctgtgagctgagaagagcgaactcgccggtctcgcggaaaggggcggttccttcgggaaccgccccttttttatatccccggatgcttctcccgggaagcgtccccgccttattcccggccccccggcgggcctcccgtccaggacgcggtctttaagaagatgcgttgacccggctgaacccctggcgcttcgaaaaaacggagcctgaattgccatcgcgaattctaagggccttcatacaagcattaaagcatttgggaacgaggcgctgaactagttcaggcgcttgaatccgcctctttccggtgatatcttcgaagtcagcgaatcgattccgggaggaaaaggaccatgacgatgaaaaccgaaacaagagcgaacggccgcggcgcatcgccgtgggcggcgatcggggtgacggtcctctttgccgccttgatttgcggaatcttgccggcggaaagaacggatcagttcaagggggcgggcatccggagctccacctacggccggccggacgatcccggtccggggtactgggcccgcaccggaaccgagatcgccgccaagttccccggggcgaaaccggaggccatctggatcgtcagccggctgaagggccgcggcaccgagatgtcgttcccggttccgccgggaaccgaccccctcatcaccgggatgtccgaggacatcagcgagcccgtcctcaagctcttcgacgagctgggctaccgcgtctggctccagaccgagcccggctgggcgcccatcgaagaggtctttcacgtgatgctcgagcgctacggccatcacaagtgcgtcgtcggcgtcggcgtcgacgtcgaatggcaccgctccaacaatcccgacgccggcgatccggtgaccgatgagatggccgaggcctggctggcggaggcccggtcccacgatccttcctaccgcatgttcctcaagcatttccgccaggacgtcatgcccccggccgcgcgcgacggcatcctgttcgtcgacgacagccagatcttcgattccgccgacgcgatgatcgccgaattcgccgagtggggcaaatcgttcgccccggcgccggtcggcttccaatacggctaccggaccgacaagccgtggtggggcccgatgaaggaccccgtcaaggagatcggcgaccggatcctggccgccgtgccgaacacggagatgctgatctgggtggatttttcgatccaggacgtctttccgccggatccggccaagggagaccgcattaaaacgatcgttaaaaatccttgacagatcttgtttttttgaataaagatatcctcatcattactgtttttcagggcatttaaagggtagccgggaaggagatttccccatgaacatcctcgtcgcctgcctgaccaagacgaggaacgccaagaaggccgccggagacgcctgatcaaaaagggggaggagccatgatcatcgagtattttcacgcttcgaagttcggcaacggaatcttggtcgcgggggaattcaaggagcggatggcctcccggggagtcgaggtcaacatccgtcacattcgggaagcgaaaccgaaaaaactgccgccggccgacctgtatctgttcagctcgccgggacgcatcggcaagccccgaggatgcgcccgccgttttctgaaaaagatccggctgacgccgggaacgaagtacgcccttctcaccaccgagggcgcgccccggccggacaaaaacgggcgaatgcccaccgaggaggagaccgccaagtggcagcgcgtccgcccgatcatgaataaaatcctcgaggggaaggggctggtcaaagtcgccgaggataagatcctggtgaccggcatgaaagggccgctggaggaaggctggcgggacaaagtggaggcgttcgcctcgcggattccgctcccgtcctgatcttcccgtcatcatcgatgggagcggaaatgatccgcccgccgatcatcggattccggaagaaaaacggtgaatgacggccgccgaagaccgctttcccccggatccgcagagacgaaaggcacgtcttcctcccggcggatggaaagcgacgccggcctgatccgggaggcccaagcgggcgatcgggaagccgtaaacgagcttattaaaagggagcggcggtatctttttaatttcctgcatcaattgacggaggatccggccacggccgacgatttgacgcaggaaaccttctgccgggctctgcccaagctgtccggtttcaaccgccggtcgagtttccgaacatggctgacgaaaatcgccttgaacgtctttcggaatgactaccggaagcggaagcggcacgcttcgctttgtctcgaccggatcgtcgttcccgccggcgacggcaacccggaacggctggtcatcaaaagcgaactccagtggtgcgtcgtccacaccctccgccaccatcttccccgcctctatcgcgaagccctggttctgcgggatctgcattccttcagctacgaggacatcgccgcgatcatcggcggcaagccggggcaggcgaaaacgcgggttcatcgggcgagaaagctttttcaaaaccggttgatgaaggaccggtgccgggcgttcacggacgattacttgtgcgtctgcgaggagatcctcgagcttgacgccgatcggatttcggccggtttcccggatgcccgcggggaatgcgagcggcttcaaacgacccgttggatcatcaaaaaattgaaggaagttcccgcgcccgaaagctccgcggccgggacgccgtcggcggggcggccgtttcgatcatcggctccacgaagaaaccggcggaaacccgtctgatacccatttccggttttgtaactccagccctcgttcgattgtctaacgttctcgaatccggcttaggccgaattcgggcatttgggaaatcgccgcgcccgagggaggattattcatgaagggttttgaactcgacagcgaaacgcctcgtttcccggcccaaagaggcgaacttttcggaatcatcgcctgccggatcatggccgcggcgatgatcgtccagggaaccgtgatggtcagcatgggatgccggacccgccggccgccggcgagccccaaacgacgctttgggaactcgccggacacgagctcaacgatcccggggccgttctcgctcgggtccgacggccggccggggaaatcggcttccccgccgggccgggaaaatggccggagggcaattcgatgaatggtcttctcgaggaattggcctgtcatggattccgcgcccggaccgtctcggccgatcatgcgcctgagctgaaagccgaaatcgaggagcggcaccggcggggcgaattcgccgaggagttttatcgggagcgtctcctggatatccggtcttcctttaatgacgccgagcccgaaatccgcaccctgatcgtcgtcgccgcgccccaaccgattatccgcctcatcttccacctgcccgtcaaacccgtcaccctggtcgtgcctccaacctaccagtacggcgtcaacgagaaggcggaacggcttctgaaaaaatgcctgaaacgcgccggctgccggctgatccggacatctcttcccttgaagctgttggccgcccggagcggcctgggggtttatggccggaacaacgtttgttacgtgaaaggcctgggcagctttcaccggctgatggcattcgggacggatcttccctgggaagaagattcctgggggccggcccggctgatggacacgtgctcccgatgtcgggcctgccggcgcctctgcccgacgggcgcgatccaggaagaggatttcctgctccgcgcccatcgctgcttgacgtttttgaacgaaagatccgatccgtttccgcagtggacggattcctcctggcatcacgccgtcgtcggctgcctgcattgccagctggtctgcccggagaacaagacggtccgaaactggtcccaggcgggggataagttttccgaggaagaaacgcgccttcttctcgaaggaaggcggccggagaagatccccgcggacctgcgcggccggctcgaacggcttggtcttctggaatacagcgaaatcctgccgcgcaacatccaggccgccttggccaactccgcctcgagcgcggattcccttctggaggaatacgcatgatcgcaagaatctggcacggcgccgtcaaaacacctcgaaaagacgcttattacgaatacatgatgaaaaccggcgttccctggtacaaatcccatgagggaaaccggggcgtgctcgtcctccagaagacgtcccccgaaacgacggatttccttctcctgtccttttgggattcgatggacgccgtccgaaaattcgccggcgaaaacccggagctggccgtttacgacttcgacgaggacaaggattttcttctcgagatggaatccaaggtggcccattacgaaatccgctcgggatttatcgggagcggcgacggcgttctttgttcatgagcaaaggaacgctgagctgatcgccggccaaatcctcccccttttcggggttcggaccaaacatccgcttttccgcccttggttcaaaccggattgaatctctccggccgctggcgtacgatgaagaggaatgggccggttatcgttcgccgataagctcgtcgtcgtcaccggggccgcctcggggctcggccgcgccctggcccggcggctggcggtcgttgaaaaagcccgcctgatcgcggccgactgccgggccgaccggctggcgtccctcaaagcggacatcgaatccgcctgcccctcccgggtttatcccgtcccggttgatctcggcgcgcccggcggggcgaaaatccttttcgacaaggcggcggccaccggaaccgtctacgccctgatcaacaacgccggcctcagcttctatggaaagacgctcgaccggcccttcgccgcctatcgcgagctcatccaagtcaactgtctcacggtcatggagaccacggctctttttctcgaatatttcctggcgaagggggaaggggcgatcttgaacgtcacgagcctgggcgggctcatctcccttccctaccagaacgtctacgccgcgaccaagcatgccgtccaatcgttcagcgaggggctgagcgcggaataccggggacaaggcgtcgtgatctgtacgttcgcccccggcggaatcgcgaccgagatgatttccaggtccggcctggaccggcacttccggatggacagctccctcctgatgccgccggagcgggccgcccgccgggcgctccgggcgttcaagaataaaagaatggtctgcgttcccggattcttgaacaagctggccgtcttttcccagcgggtcgcgagccgggcccgcgttctccggaccaccgagcggatttactcccccaaaaacgtcagggccgggaggcggccggcttcttcagggactcggggagaaagagagccaggccgaaggaaccgatgatcatgacggtcaaggccgccagcgatccggtcatcgatcccgtcgccttcgatttgaacgcgtccatggccaggatgaaaagaatgcccgaaacctgtcccatgagaaggagaaccgtgttggacgctccttccggaatcgggcgggtgatctcggccgcgtactgaaaaccgatcggtcccgcgctcaggagaaagaatccgaagacgaacccggcggccaggaggaccgggaggctcgtggtgaaggtcattccgatgagccccggaatcaacccggccagggcgatgaggatgaatggcttccggcgggcgatcttgtcggaaaggacgggcatgacgatcgccccgatgatcccgcccaagagcatgaggccgcccagccagccggcctgggaaatcgtgaatccgcggggccggacgatatcttcgatccaggtcgagacggcgttgaacaggccgaggccgacaaaaaagatggtcatcaaaaacagaacgtcccggcgccggaacatggtcttcaagccttcgaacaccaggatccgctccccgggggcgcccggttcgggcggaacgggcggatgttcgcgggcgatccagaggaagacgaaggcggccagggccgcggccaagccgtaaatccagagcatttcttcgaagccgacgcggaggacgagggcgggagtcaggatcatcgcgaccagcggaccgaggtagagggccagcgtcccgagacccgtggccgtcgcccgctcccggacggggaaccaccgggaagcgatcgtcgtcgtcgccccgatgatgaaaggctgggcggcggccaggccgacctgggagatgaaaaccagggtgaaattcgaagcgaaaatgccccgggcgagcccgaaaaccgccgtcatgaccgcccccaggccgaccgacgcccggaagcccttcttgtcgatcaaccaggcggccggatagaacatgggaatgtaaaccaccatgaagctcatggagagaagcccgatcatcaggtcggaggtgtgatagaaggcggccgccgtcccggtgaccggggcgaaggtgatccagagcacctcgcatacgccggcgatcaagacatatgcggccaaaaccagccagcggtacccgtatgctttccccgtcgatgcgtccacgagtttctcctcttttcttgcagatgatgggaaactctaacatttaggggcggatctctcaaccccgtcattataaatgtcacgtaaacattgaaagcgggctgagtctgaatggaggggcaggccgcaacatgtccaggatgcccgggttcgtgatcccctgccgtgatggatcgaaggggagattcgcggaatggtctgattatataaataagagctgagcgtgagtctcctcaaggggaacgcggccgcggtcagagaagccgggaaaggattgcgttggagatgagaagcttgtccttcggaatgcggaggatcccgctcgaaaggacgatcagcccgtcccgcccgaggctttcgatcgccggccggagccgctcgtccggacgaaagccgaatctcccggcgaacgactcgagatcgattccctcgacgaggcggaggccggcggccagggcttcgcgggcggccgattccggatccagctcgacgatttcggccggggggacggccccggccgccgtccccgcccgccattcctcgaagccggccgcgttgctccagcgcttggctccgatatgggaggcggccgacggccccagcccgagaaacggctcatagcgccagtacttgaagttgtggcggcattcttttccgggaagggcgaaactggaaatctcgtaccggcgcaggcccgtctccgccaacgcatcggccgcgcgctcaaaggcgtcgacggccgcgtcttcatccacgggatgctcccgcaggaccttctccaacggcaggccttcgacgttttcaaggaaatagagggagacatggtcgggccggagaagccggacggcgtccagagtccggtcccaggaacgcggcgtttcgcccggcacgccggccatcaagtccaggctgagggaatcaaagccggcgtcccgggcccgccggacgaacgaaacggtccggtcggcggacgccgggcggccgagaacgcggaggacgccgtcgtcgaaggactgggcgccgacgcttaagcgggtgacgccggcccggatccatccgcggaaccgggccgaatcgctcctctcctcgttttccggaccggagggattggcttccagggtgaattcaagcggctgcaagggaagccgcccggccaggtcgtccttgagacgggcgacgtcgccgggatcggccaaggacggcgttcccccgcccagatagagcgtgtcgaagacgagcggcgtctcgtgaaccgccgagcccgcgacggaccggccggagcggaacaaggccgcttccgcggcgattcctttccgccaggcttccacccggggccggattccggccgtctccgccgggaggctgtaaaaatggcagtacggacacttccggcggcagaaggggaaatggacatagagcccggcggccgcgggcttcacgccgtgacgatttcgagaatttcgtccggggaatcgacaatgtaagtggggtcatggtcggccaggaattcccgatgctggaagccccagctgacggcgatgaccggaacgcgggctttccggcaggcctcgatatcccgggcctcatcgccgacgtacatgacttcttccctcccgacgtcctcctccttcatgacgtgccggagggcgcgcgttttcccgaacaggtttttctcggagtggatgaaatcgaacacctccagctcgcgggcctggaggaacttttcgacgttttcagtcgaattggacgtcaggatgcccaaccgcacgccgagcgctttaagctccaggagaacctcccggatgccggggaaaagccccaacttgtcgatttcccttccgagctccttttgatagtgcagaaggagatacggcagcttggccagcgggatccggtgccgcctgaggatttcccggctcgacatgccgcgcatggcctcgatctccgttcgatcgagcgggggaatccccaggtcttcattgtacttgttggccaggcggacaatggccgccagcgtgtcggcgatggtgccgtcgaaatcgaaaatgagggttagagctttccgccgggacgccttcgtcccttcttcccggcgtctggccatgtccttggtcatcgggatctctttagatttcaatcataagagccgattttctttttgtcaaccttcgatcgtctctctgacgaatcgcgcggcgagaacgagaagacgcgccgacggcgggtttttcccctcgaatttgacttgagtccgcgccatccactataagggagaaatcatgacgcggcggacgagcggaacaacctgggggattttccttttctggggcgccgccctggtcttgagctttcttaatctttccggggatctgatgaacgacgacgaggggacctacctttacgccgcctggcggaccgggctcggcgaagtcccctatcgcgatttctcccttgtccaggcgccgctcggcttttatctgggcgccgcggtttttaagctcttcggacccgccgtctggcccgcccgggctctctccgtgctcttcctgctcggcgccgccttccttgttttcgagtccgcccgccgatttcttaaattgaagaccggcttcgcccttgccgccgccggcgtttttctcttcaacaagcatgttttttttctcggccgctccttcatgcccgacgtcccgatgatctttttcggcacggccgcgctttttttcgctttgcgggccgaaagctccggcccggatggcggtcgcgcgtcccaggcggccctgctggccggagtgatggccggcttgtccgccctggccaagatcaacggcgttctgattttcgccggatatccggcgtttctttttctcgaggccgtccggcggcggaaaacctggaaaacagcggcctcccgggtcgcctcggccgccgcgggattcgcggcttcgttcgccgttccgttcggtttttttctcgtcttcgttcccggaacgttcgacgccgtggtcgggtttcaagccgccagggagtccgccgcctccgtccctttcatccttcaagccggccgccgtatcgcccacttgatcggaaaccacaactacggtctcgcggccggcgccctggccgcgctttcggccggacgagccggagcggaggagaacgccgcgggcctccgccggatccgcgtccttctctggacatccgccgcggcggtcctggccgtcatcttcgtccccggcgattttttcatccgatacgccgttttcgctttcgtccccctggccttgctcttcggcgcgggaggcgaagccctggctgaggggaaaaccatcggccgaaggatcaccctcggtttcgtggccgccctgaccctgctctgcctcggcccgaccctgagcccgaaaaagatcctggcccgggacgaggggacgcgggcggcggccgccttcatccggcaaaacacaaaaccggcggattatgtcttcggcgacgacccgtttctcaacttcctcgcccggcggccctgcccgccggacttggtcgacgtctcggaagccatgatcgaggccggccggatcacgaccgccgaagtcgtcgaggactgcgaccttttcaacgtcaagatggtcttcgtggaaacgggggtctccgcccatcacctggtcaagctgaaggattacgccgcgtttcgcggctacctgagccgccgattccgcccggcggccgcgatccggcgcgaattcctcaacgtcgagttcttcatccgctgatcggtgaagcctccttaaaggccgccctccctccccatgtccttccaagcttcaacggcctccggctccttgatccccgggtccggggacatccgatcgccggcgctggaaatgcgcctccaaagcaaaagcgtttcccctgacgtggacctccgcaaggggttgagtgaggcgcccctgaatgataacatccttacgtctaattctaccgcgtctcgaggcgaccatgcgttacatcggcactcacgccaatcatcccttcgcctccgcgtccgaggccgtcctcctggggatggtcccccggggcgggctgttcgttccggagttcatcccccggctggaagcggacacgctgaccgcccccgactatcttgagacggcccggcggatcatggccgcttactttacggatttcgagccgcctgtcctcgacggctgcctccggcgggcgtacaacccggacaacttccacacgcccgacgtcgtcgccctccggccgctcggccggcgccgcttcctcctcgagctgttccacgggccgacggccgctttcaaggatgtcgccctccagctgatgccccacttgaccgccacggccaaatccctgaccggggatcaaacccacactctgatcctggtcgccacgtccggcgacaccggcaaggccgccctggagggctacaagaacgccgacggcatttccatcgtcgtgttttatccggacggcggcgtgagcgaggttcagcgcctccagatggtcaccaccgacggccggaacacccgggtcttcgccgtccggggcaacttcgacgactgccaaaccggagtcaaggcccttttcctcgacgccaacttgcgcgactacctggccgggctgaatatcaagctctcgacgggcaattccatcaactggggccggctggccccccagatcgtctactacatccgggcttacgccctgctcgccgccggcggcgaaatcaaaatgggcgacgaggtcgacatttgcgtcccgaccggcaacttcggcaacatcctggccgcctggtatgcccgggccatgggccttcccgtccgcaagctcttctgcgcttccaacaaaaacaacatcctgacggactttttccaaaccggagtctacgacactcaccgcgaatttttccggacgtcgtcgccctcgatggacatcttgatctcctccaatctcgaacggtttctgttcgaaatcgccggccgggacgcggagaagatcaaaccctggttcctcgaccgcttccggacgggccggttcgagatcgatgccgaaacaaagaaaaaaatcgacgcgttcgtcgtctccggctgggccgacgagccccgggtcttcgccgaaatcaagacggtccacgaagagaccgggatcatcatcgacactcacaccgccgtcgcctcggccgtctcccgcgatgtcggccccgcggacggtccggcgaccatcatcgcctcgaccgccagcccgttcaagttcgcccgggacgtcctgggcgccgtcaccgggcaagccgagccggacgagttccgggcgatcgaccgcctgagcgagctggccggccggccggcccatcgggccgtccgggggctgcgggagcggcccgtcctccacgagggcgtgcttccgatttcccagatgcgcgaagccgtcatcggcttcgccgaacgcgtccggaatcggggctgaggggggaatgacggtgaagcacatcatcctcgtcggcgacggaatggccgacgatccccatcccgccctcggaggaaaaacgcccttggaagcggcggccacgccgaacatggaccggatcgccgccctcggccgcgtcggccgcgtcctcaccgttccagccggcttcccgcccggaagcgacgtggccaacctatcgctcctggggtacgacgccgcggcccactaccagggacgggggccgatcgaagccgccagcatcggggccgccctggacccggacgatacggctttccggtgcaacatcgtcaccctgggcgacgggctcatggccgattattcggccggccacatcacgaccgcggaatcgcgccccatgatcgaggagctccaggccgccctgggaacggaccgcgtccgtttcgtcccgggaatcagctaccggcacctgctgatcatccgcgattttccggcgggcctggactgcacgccgccgcacgacatttccggccgggaatgggcctcccacctgccgaaggggccgggccgggagctgatcctcgacctgatggagaaagcccgtcccgtcctggcggccaacgcggccaaccggaagcgggcgacgccggccaccgacatctggccctggggccaaggccgggcgatgcgtctgccgacgctggagcaacgcttcggattgaggggatcggtcatctcggccgtggatctcgtccgcggactgggcgtgctggcgggcctcaaggtccggctcgtcgatggggcgaccggctatctcgggacgaattacgcgggcaaggtcgcggccgccaaggaagccttggccggcgaggatttcgtctatctccatgtcgaggcgcccgacgaaaccagccacgagggcgagctcgcgaagaaaatacaggccatcgaggaattcgaccggcacatcgtcggcgaaatcctgggctgggcggagagcaagcccggcgtccggatcctcgtcgctccggatcacgcgaccaagctggcgacgaagacccacgccgccgacccggttccttacgccgtctgcggcccgggcgtcgtccgggacggcggatccgcctacaatgaacgggccgcggaaagcgtccccctcgaggcggccgtcgggctgtttgagcgcttcatccgcggaacttttgaataggggacgcggctcccgagggcggacgcgctcaatccgtttcattcattcagcccttgacaagacgtccctttccaacccatccttccctctatgaagcgttcggggaaagctccgcttgcgccggtcgtcttttttttcgctggcgccctctgtctttccgccgggccgcttttatcccaggaaacggatttccgcggccaggtctccggcgagctggccattcccttcgaaagcggccgccgcgtccctctccgcgtccgctaccttccgcagttttccctcaaaacgcccgtctcggcgtcttggaatttcgacatcgaggcgtcggtcaacgcctcgctcacgctcgacgccgcctcgggctggggctcgcgaaaaggcgacctggccctctaccggctttgggcccgcctcacgacggcccggttcgaggcccggcttggcctccagaagatcgagttcggctcggcccgcctcctccgtcctctcatgtggttcgaccggctcgaccccaacgatccgctccaactgaccgacggggtgaccggcctcctcctgaagtacacgtttcaaagcaacgtttccgtctgggcctggggattgacgggcaacaatgaccgcaagggctgggaatcctttccgacccgggccggcacgatcgagtgcggcggccgggcccaggttcccgccctcggcggggagctggccgtgacctttcaccgccggagcctggacgccttccgcgggcctcttcctcttgcttcggacgagcgttccggcgtcccggaaagccggttggggctggacggctattgggatctcggccccggcctctggttcgaggcggccttcaccaagcaggatttccaggtcttccccttccgccatcaaaaagccgtcaacctcggggtggagaacacgttcggcctggggaacggcctcaccctcctggccgagcatctcctctttcaatcatccccccggttctgggagcggggaacgagccgctccctgagcgccctttccctcgattaccctctgggtcttctcgaccgcctccgggtcatggttttccgcgactggacaggccgggactggtaccgtctcctgacctggcaaagaacatacgaccggctcagcttgaacgtcatcgttttctggaatcccgattcgtacgggctttacggagatccggccgccgtgaatctcttcggcggccgcggcgtctatctcatggtcgcctggaatcactgaaggagaggatgtcatggagaacagcgttttgatccggacggtgaacttgaccaagatctacccttcgggggaacagccgatcaccgccctccgggatgtcaatctcgtctttcaggccggcgaattcgccgggctcgtcgggccgagcggctcgggcaagaccaccctcctcaacatcgtcgggtcgctcgacgtcccgacatcgggaagcgtcgaggtcctgggggaaaaaatcgagacgctctcgcacaagaaggccgcccggctccgcaaccgccacatcggcttcatcttccaaacattcaacttgctgccggtctacacggtctatgaaaacgtcgagtttcccctgcttcttctcgggatgacggcggcggcccggcgcaaggccgtgcgggacgccctggcctgggtcggcctgtccgaccgggagcattcgcggccggcccaattatccggcgggcagagtcagcgggtcgccatcgcccgggccgtcgtcaagaagcccgacctcgtcctggccgacgagcccacggccaacctggacgcggataattcccatcacatcctccacaccatggaggacatcaaccgcgatctcgggacgacgttcctgttttcgacgcacgacgcgaaggtcatcgcccacctgcgccggaaaatcaccctcgtcgacggccgggtgaccgccgacgaggcccggacaacgtgaggaggcggccatgatcatccccaagctcgccttccgcaacctcatcggcaacggggcgaaaacctggctcaacgccctggtcctctcgttttccttcgtggccatcatctggggccaaagcctgttcgagggaatggaccgggaaatgtccaaggtcaccatcgaccaggaggccggcggcggccagtattgggccggcgcctatgacccgtacgacccggcgacgatcgacgacgcgccggcggcgatcccggccgatttggccgccgaagcggcggccggccgggccgcccccatcctaatcgtctccgcgacgatctatcccaagggccggatgttccccgccctgctcaagggggtcgacccggaccaagacgttctcaagctgcccttcgaccgccttctcggcggcgacggcgaaatccccggcttgatcggcgcccggacggcgaaaagcacgggcttggccaagggggacaccgtgaccgtccgctggcgggacgcctccgggacgttcgacgcggccgacgtcgtcgtcgtcgatgtcttccaaacccaagtccagaccgtcgattccgggctgatctgggtgccgctcgagaccctccaggccatgaccggccggccgggccgggcgacggtcgtcaccgtccctgtcgggtccgcgcctcgatcctatcccggctggggcttccaggattacgacgttctcctcaaggatatcaagagcttcgttcaagcgaaatcgctcggcttttcgattttttacgtcaccctgatggccctggccctgctggcgattttcaacacccagatcttgtccatctggcaccgccgccgggagatcgggatgctgatcgccctgggcatgccgcgcggccgggtcatcgccctcttcaccctggagggggcgctcctttcgatcctggcggccgcggtcggggcggtctacggcctgcccctcctgatttacatgtccaaacacggctgggtcctgccggccgggcaggccgacagcttcggcttggccctcgacaaagcgttgtatcccgcctacagcaccgggctggtcttcggcacgattctcctcgtgctggccgcgaccaccatcgtcagcttccttccgacgcggaaaatcgtcacccttaaaccgaccgacgccctgaaggggaaatggtcatgatccgctttctgttcaaagggcttctccgggaccgttcacggactttgcttcccttcctgaccgtggcgatcggggttttgctcaccgtctttctcgagtgttacatcaccggcgcggaacaccaaatcatcgatttcaacgccgatctgctgacgggccaggtgaaggtcatgacgaagggctacgcggccgaaccggattccctccccaacgacctctcgctggacggcgtcggaacgcttctcagcgaattgggaacggactttcccaatatggcttggacccctcggatccgtttcggcggccttctggacgtcccggatgaagccggagagacgaaagcccagggaacggtcctgggaacggccgccgacatcctcatgccggggagcgccgagatccggcgcctgggcttggagaacacggtcgtccggggccgtctgccggagaagcgaggcgagattttgatcggcgaaatcctggccgaccgcctcaagctccagcccgggggaacggcgacgttgatcggctcgacgatgaacggagccatggccacggccaattacacggtcagcggaatcgtccgctacggcgtccgggccctggaccggacggggctggtgatggacctggccgacgcccaggcggtcctcgacatggaggacgcggccggggaaatcctgggctggcggacaaacggcccctacgaacggaagctcatcgaggccgtcgccgccaggttcaacggccggaccgaggccggctccggcggcgatctcgccccggtcatgaaaacgctccgcgaccaaagcgacctggccgccctgctcgatcagttcagcacggttcggggagcgattttgaccatcttcatcctggccatgtcgctggtcctctggaacgccggcttgctcggcagcctccggcgctacggcgaaatcggcgtccggctggcgatgggcgagccgaagggcggcgtgtaccgggcgatgctgggcgaggccgtcatggtcggcgtccttggcacggtcgccgggaccgccctcgggctggccctgagctactatctgcaggcccacgggatcaatatctccgggctgatgaaaaacgccgcggtcatgctgccgtcccacctgtacacccgggtcacgcccgtcgcctacgtcatcggcttcatccccggcctcctctccaccctgatcgggacggccatcgccgggagaggcatctacaagcgatcgaccgcgtcccttttcaaggagcttgaaacatgaagcgcgcccatccccggaaaattccgccggccgtcgccggaatcatcctgatcgttttgtccgcgccgttttcggtcccggccgcgggagcggagcaggcggacctgacgccggaggccgttctccggaacgtcgacgagaatgccgtgcccgggagcaagatcatggtctcggccatgaccatccacggccggcggggcgatcgaacgatcaagtcccgttcctggatcgagggcgaggacaaggccttcaccgagtatctggagcctccgcgcgagaaggggatcaagatgctgaagctgggcgaccagctctggacgtacaccccggccacggaccggatcatcggcatttccggaaacctgctccggcaggccgtcatgggctcggacttgtcgtatgaggacatgatggaaaacaggaagtggtccgagatctacgaggcggccgacgacggcggggagacgatcctcgaccgcccctgccggatcctcaagctgacggcccgggtcgccgacgcggcctaccacgtccggcgggtgtgggtcgaccgggagcggtttctcgtcatgagggaggagcgctacggcaagagcgggcgccttctcaagacgctcgaggtcggcgacgttcggcggatcgggggccgttggatccagacgcgggccctggtccgcgacgtcctcaaagaggggaacggcacggagttcgtcatcgagtcgatcgatttcgacgccccgatgcccgaggcgctcttctccaaggcgtccctgagaaaatgaggaagccgcgggcttctcgacccgcatatcaggccggcggaaaaggggacgcgtctctggctgatcagagatcgaggtcgcagaccgccgggagggctcccttgaaggcgcgccccggctcatagggatcggcgaacaggcccgcctcgaccagcttccggttgacgattccgaaaagatagtgccagatcatggtgaagccctcgctgaacggcaccccggaacgggtgaagctgaggccgtcgaggtcggcggcgaggcggtcataatttccggccagccattgttccatcacccgccggccgatcgcccgcagctcggcggtcatgacggcgtcgcgtccggtcaggacggggatccgggtttcgtaccacccgtccttttcccggacgtattcgagaacggaaagcaggcgcagaaagacgcgggattcgtcttcatccgtccccgccgcccgggcgagatcccaggccgctttcgggccctcccgcagggccagcatcatccgtccaatcttagctccgccgcggcggagcgagtccgacaacagctcccggtgggcattcctcaccgcctcgggatagcgggaggaaagaccgggaacattccaaagcaggtcggggaacagcatccgaggcagggcatgatggtcgccgaacgaggtgaaatggactccgctgaactcttcgtagtggctgccccagtagattttctccaacgacgtttccccgagctcttcggcggcgggcacgtagcttccgtcgaaccgttcctccgtcgtcttgcggtattttttttcatccgtcacggccaggccgtcccaatccagggaaacgcagccgaggaggaaataggcgaccgagccgggatccacgcccgggacgtcgtaagcccggagggcggtctcgatgtccgcccgccgggctagcagcgcttcggccagcgatcccgcatagcgctcgctgacttcgcggatgcggccgacatcggcggccgtgaagagggcgaaattcaggagataacggtcgccgtcgaaccggaccagccggagcttcaagagatccgcgattcccgcggcgccgaggtcccgggcttcggctttcgcccgggccatgggtccctcggccagctcgagcaaaaaccgctggacggggatccgcgccatgaccccgttgaaacacggcgtccggtcgcaggaggacgagccgacgatgctgtattgaagcagccgctcatcggcggcccggccgccggcggaggcggcgttcgcgagaagcgagcccgccgcaagaacggcggcccaaagaaaaatcaaatgaacggtcgatttattcattccaggcctctctttttaaatacgccgcccggccgaaaaagttgacggggccggggattctcttgaaaatccggccggatcggataaaatgaaaagaccgtgccgaaacacctttccatttatatcgaccggttcagcggcttgtaacccgccccttccgccctttccaggctttttccggggtttccgcccctctcaagcgccgcgcgaaatcacaaggagcatgccgatgaaaatcgtcgttttaggagccggactcgtcggagcgccgacggccctcgacctggccgcggaggcgcggttcgaagtcaccgcggccgatcgggacgccgaagccctcgcccgcctcgagggaaagccgaacatccggacggtccgggtcgacctcgccgatccgaaaaccgtgacccgcctggtcgaaaattacgacctcgtcctgagcgcggttcccggattcatgggttttcagacgcttggggccgtgatcgccgcccggaaaagcgtcgtcgacatcgcctttttccccgaggatccgtttcttctccaggaacaggcggaagccgccggcgtcaccgccgtcgtcgactgcggcgtcgctcccgggatgtcgaacatcctggccggttacgccgcttcccggctcgaggagacccaatccattctgatctacgtcgggggcctgccggagattcgggaatggccttatgaatacaaggccgtgttctcgccggccgacgtcctggaggagtacacccgcccggcccgctatatccataacggcgagctggtcgtgaagccggccctctccgagctcgagcggctggaattcccgggcgtcgggacgctggaggctttcaacaccgacggtctccggacgctcgcccgaacgatgcgggtcccccacatgaaggagaaaaccctccgttatcccggccatgtcgaaaaaatggccatattccgggattcgggctttttcgacaccgacgagatcgaggtcggcggcgtccgggtccggccccgggacgtcaccgcccggcttctcttctcccgctggaagctgcgggaaggagaatcggacctgaccgtgatgaaaatcatcgtggaaggccggcgcctgggaaacgccctccggtacacgtatgacctgctcgaccgccgcgacccggcgaccgggattcattccatggcccggacgacaggctacacggcgtcgtgcgccctccgcctcctggccggcggcctgttcgcggacaagggaatcgtgcctcccgaaatcatcggccggcggccggagtgcacggccttcctgctcgacgcccttcgcgagcgcggcgtcgtttaccaggagaccgtcgaacacatctcctgacgaattcgcggtcgaaaagcgcgcgaaggtcttgccttcgtccgggcggcggggcataatgagcctcaaacatccagacggagcggaaaggagccggacgatgctgaagcgctatcagatcgtgaaccaaaaaatcgtcgaaacggccgaagacaaggccgccgtccttctctatctcaaccccgacgaatccgaaaagcgacgacttgtggacgaatatcagatcgacgagcacaccctagcttccgccctcgaccccgacgagcagtcccgcctcgaatgcgagccgaaccatatcgccttcatcttcaagcggcccaagaactattccggggacgaccagctcctgttcaaagcctcgaccatgggcgcgttcttcttcggcgacgtcctcatcctggtcgcggccgacgacacggtcatcttcgaagggaagcaactggcccgggtcacctctctccgcgagctgaccatccggctcgtctaccgggccatttaccatttcatggagcacctgcggatcatcaacatgatggccgacgacgtcgagcacaagatcaacaaggccatggagaacaaatacctcatcaacctcttcgccctgcagaagagcctggtttactaccagaacgcggtcggctccaacggcgtgctgatcgagaagatgcggcacaacgccggccggttcggattcacccaggaggagatggagctgctcgacgacctggtcatcgagaacagccagtgccaccgccaagccgaggtctactcgaacatcttggccagcttgatggatgcccgggcctccatcgtcagcaacaacctcaacgtcctgatgaagaccttgaacatcatcaccatctcgatcatggtgccgacgctggtcgtctcgattttttccatgaacgtgaccctgccgttcggacttaaggagctgccggccttctggatcatcatgggcctggccgcgatttccatgaccggcttcctggccttctggaaatacaagaggtggtgagatcccccgtcggagaatcggcggccgggaggacggttccttccggataaaaggccctcggaggaaacccggcctcgggagcgtttccggtccgcgttcggagtccggctccctcccgctccggccaagggggaggaggatttccgcccggaactcttaaaaaaaacggaggatcaaaggcggatctttcagattttctggagcttgtcgatatcgctgagatcctgtatccgtcccacggccgtcttgtttcgtatcaaatcggccttggaaatgatgtcgagaaaaaatattcaaatctttcgtaaaacgcggctccgcataaaaagaatacgcatacccccctacaatcaagtagaggacgttatgcttgtttaataatacgaaaaattctctgaagtccgcttcgattctcattttttatgaaatagaacatttcacggagggcttgaagcgtatcccgcttttcttccggaacggcttctttccaataccggatatccagttcctctgcttcattcaaaggaacaatccgcgcccttttcagcatggatatgttatatcaatccgcgacgggggtttcaaaacggaagaaggggaaatttgaggaagcgccccgtctatggtaaaaatagggcctcgatcgatccgaaggacaagaccatggcggatgaaatcccgaaattgtatgaaccgtccccgcacgagcggcgggtgacggagcgctggcttgcggccgacgccttcgccgccgtccccgaccgccgcgaccgccggtacgtcatcatgatgcccctgcccaacgtcaccggggccctgcacatgggccacgccatggacaacgtcatgcaggacctgctcatccgctggcgccggatggccggcgacaacaccctctggatgccggggacggaccatgccggcatcgcgacccaggctgtcgtggaaaagcgcctcttcgagctcgagggaaagacccgccatgacctcggccgcgacgccctggtggcccggatctgggcttggaaggacgaataccaggcccggatcatccgccagcagcagcggatgggctgctcctgcgactggaagcggcagcgcttcaccatggacgccgtctgcgcccgggccgtccgggaagctttctttcggctcttcgccgacgggctcatctataggggcgaccgcctggtcaactgggactgccagctccagacggccgtctcggacgacgaaatcgtccatgaaaaagtccaaggccatttctggcacatccgctacccggtcatcgagccgcgggccggcgaaccggaattcgtcgtcgtggccacgacccgccctgagacaatgctcggcgacacggccgtcgccgtccatcccgatccggccgccgagctcgagcgccgaatcgccgaaaccgcggttaaaatcgcggccgccccgaaaaaagaccgggccgagcttgaacaaaccctcgagaatctcgaatcgcgccgccgcggcgtcctccccctgctgttgcgccttcgggacatggcccgcgacgggcgccgcctccgcctgcctcttctcgaccgccccctccctctcatcgtcgacgcctgggccgatccggccctcgggaccggctgcgtcaagatcacgccggcccacgatcccaacgactacggcgtctgggagcggcacaaggacgaaatcgggatcatcaacatcctcaaccccgacggtacgctcaacgcctcggccgggccctacgccggagtcgaccgtttcgacgcccgccgacgggtcgtcgccgacctgaaagcccggaacctgctcgaatccgtcgaggaccgggagatggaagtcggccattccgaccggtccaagacgccgatcgagccgtatctcagcaagcaatggttcgtccggatgggcgacgtggacggcggcatcgtctgcggggcgggcacgcccaacgagttccgggcctccggactggctcaggcggccatcgacgcctcccggcccggctacaagtctccgaccggccgccgcctgacgttcgcccccgacgacgatcgctacggcggaacctaccgcgcctggctcggcgagaagcgcgactggtgcatcagccgccagctctggtggggccaccggatcccgatctggcacggaacgttccccggcgggaaaatcgccgaggtcgcggcccgtcttccccaggccggggccgaggaaatgcgcgtccggatcgccgacgacgccggcgattcgttcgagcccggcgggcgcgccgccctcgatcccgcccggaattactcgatcctcgtctcgctccgtaacgaggacgccgaaactctgcacgccccgaagctcgaggccgccggcttggttcaggatcccgacgtcctggacacatggttcagctcggcgctttggccgctctcgaccctcggctggcctgatccggccacggccgtcctcgatcccggccagcggcccctgacgccgccggagcccggcctcgatgactgcctggattattactatcccggatcctgcctcgtcaccagccgcgacatcatcaccctctgggtcgcccggatgatgatcatggggctttacctgcggggcgacgttcccttcaccgccagctttatccacgccaccattcaggacggcaagggcgagcggatgtccaagagcaagggcaacggaatcgatcccgaggacatcatcgagaagtacgggacggacgcgatgcgctacgtcctctgcgacatgcagacgggaacccaggacatccgcctcccggtccaagccgtctcgcccttcaccggcgagctggtcgatctggccgcggccaaacacggccgctcgatcttcacgtacatcgaccccaggaccggcaaagagttcgacgttctcgggaccatgcccgacctgccggcggccaagatcatcagcgagcgcttcgagaccggccgggccttttgcacgaagctgtggaacgccgcccggttcatgtttcagaatctcggcgggcatcccttccggccgctttccgaatccgacttggccgcagaggaccgctggatcctttcccgtctttccaaggtcatccggaatgtggatgaagagctccaggcttacaatccctcggccgccctcggggcggcccgggaattcttctggggcgagctctgcgattggtacctggaaatcatcaagccccggatgagggacgagggcgcggccccgacggcccggtccgtcctggccctggccttcgaccatgtcctccgcctgttccatccctttgtcccattcatcaccgaggccctctgggaacggctgaacgggcagtgcccggtccgaggactcgcggccccgctcccgccatccccgcttcttctccaagcccgctggcccgtcccgaacgcgcaatgggaggacgacgcgctcgaggcggatttcggcctggcgttcgatctcgtccgggcgatccgggacatgcgcgcccgccgcggcgtttcacccgccctgaagcttccggttcatgtccggacgacggaaaaggacgccgcggtcctggcccgccttcgttccttcgtgattcatttggctcatctcgagtccctggacgcgggtccggctgtcgtccggccggcggcggcggccgtccaggtcgccgggggcatggagattttcgttcccggcctggtcgatccggtccgggaacgccggcagctgacggccaagcgggacaagctcatcgaggaggccggaaaaatcgaggctaagctcggcaacgaaggcttcgtcgcccgggctccagccgaggtcgtcgaaaaggaaaggcggaagctggccgaatgccgttcccaaatcgaggcgctcgaggccggcctccgggagctttctccgtaaaaaagacactccgatgaacgtgcgggccttgtccagccgggaggaaatcctccttcgtgttcccgacgacgccgacctcttcgtttcccgctatcccgtcccggcggcgccggcggcgagcctcgttctcgatgccgtccaacgccccctcggcgccccgccccttcgagaggcgctgggctcccgccggcccggcgaggtcgtcgtcgtcgtttccgatgtcacccggcccgtcccctaccgggatttcctggcgccccttctcggggaaatcgccgcggccggagttccccaaaatgatattctcatcctgatcgccgccgggatgcatcgcccgagcacgaccgccgagcgccgggagatgttcggcccggacatcgtcgaccgctgccggatcgaggatcaccaagccggcgacggccccggcctggccgcggcgcccgggcggagcgcctccggcgcggccatccgtctcaaccggcggttcgtcgaagccggcttccggctggtgacggggcttgtcgagccgcatttcatggccggtttctccggcggccggaaaagcgtctgcccgggcctgtcctcgctcgaaacgatccgcgaattccacggggaaaagatgctttccgatccgcgggcggccaacgccgttctcgaaggcaatcccctccatgaggagtccctctcgatcgcccgggccgccggcgtcgatttcactctcaacgtcgtcgtggaccgcggccgccgccttgtccgggcgtttgccggcgccctggaaccggcccacgaagccgcctgcgccttcgtccaaacctgcgccgtgcgtccggtccgccgtccagccgacgtcgtcttgacgggaagcggcggctatcccctcgacgcgacgttttaccagtgcgtcaagggtttcgtctcctgccttccggccgtccgggaaggggggacggtcatcgccttcggcggctgctccgaggggctgggaagccccgcttacgccgggttgttgagggagtacgccggccgcttcgacgatttcctggccgacatcaagcgccccggcgtcttcaccgtggaccaatgggagctgcagatgcaggcccgggccctggcccgggtcggggccggcggcttgcttttcctctccgacggactgccggaggagacgatgaggatcttgacgttgacgggccggacggcttcccgcggccggctgggcgcggccgttcaatccgccttggacactgccctcggccccggcaaaacactggccgtcttccccgaaggcccctactgcgttcccgaatccattccgtccggggagtgaagaagaataaaatgcgcattctgatcgcgatcgacggtttcaagggttccctgacttcaatcgaagccggagcggccgtggccgcgggtctccgagagggattcgcccgcctcggcgtcccggccgcgatcgatgtcgtccccacggccgacggcggcgacggcaccgtcgaggcgttttacggcgccggcggcggccggaaaatttccgtgacctgccccggtccgctgggcgatcccgtctcggccgaatttcttctgcggcccgggggcaaaaccgccgtgatcgaaacggcccgttccagcggcctgacgctggtcgaggggaggcgggacatcctgcggtccgatacctccggcctcggccgccagatcgaggccgccttggagcaccggccggagaacgtcctcatcggcctcggcggctcggcgacgaacgactggggggcggggatggcggccgccctgggagcgcggtttctcgacggcgagggacgcattctcccgccccggccggcggcgctctccgaactgcgaacggtcgagaccgccgggctcaatccccgtctccaggccgtccgtttcgaagtcctggccgacgtcgacaatcctcttctcgggccgcacggggcggccgcggtcttcgcccctcagaaaggagcggacgctgagaccgtcggccggctggaggaaaccggccggcggttcgccgacgccgtcgaggcggccctgggaagaaaataccgcgatcttcccggagcgggcgcggccggaggcctcggtttcgggacggccgcgttcctcggagcggtgatccgccggggagtcgagacgatcatcgaggcgaccggatttaaggagaaagcccgccgggccgatctcgtcgtcacgggggaagggcggttggatttccaatcgagacggggaaagacggccgacggcatcgcccggctggcccgggagctgaagaaaccctgcgtcgctttttgcggctcgatcgacgggccgttatcggattatgtccccgggttgttcgccgccgcttacgccatccgccccgaagccctctcgctcgaggacgcgatccggcgcggcgcgcactacctggaaaccgtcgcccgccgggccgcccgggagatcgccgccctggccgccggctcctgacctcggccgcggccgttcccgtaactccgtcgcttgttcatcggccaacccaggattattcctgaggcaaaaagacggcgatgaccgcaaagacgagggccaggatgatggcgacgagccaaagggaatagagcggacccggctttccgatttccttttttgtcgtctccttgtacgccgaaaggtacctgcccgtgaaaagacgagccataaacatgttcgtcttccgcccccgccggtcgagagccgccatgatcatgatcaaggcggcgacattagcgagggcggcgatcagggccaaacccaggaaaacagcgcgcgcgctcattattctcctccccttctaatataaggcctccggggggatcagaccgcgcgccggcgattcttttctgtttttccgcttccgtcagtattttttcggcggagcgccgagcccgttgaaaatcgagccttccgggaagctgctttggacgcggatgaagccctcccggacgaggccggccaagtccatcctcaggcgcgacaagatttcaacggaatccagcggtcccggcgtatggatgccggcccacccgtccccgccggcccgcttgaccgcataaaggcattggtcggccacctgcagggcgtcttcccaagtgaaggcctcgggattctgttcgaggatggggaaagccgcgaagccgatggtgattttgcagccggtcgttgcgccgccgggcaggacgctgacatggtcgcggacggcccggcaaagcttctcggcgatcaagtgggccttcgttcgatccgtacgcttggccaccaggagaaattcctctccgccccagcggaccagggtgtccgccgtccggctggcggttcgaagcacccgggcggtttccatgatcacctggtcgcctgcggcgtgaccgaattcgtcgttgatccgcttgaagaagtccaaatctcccaggaagagcaccaggtcctcgttgcggttcaaggggctctcgcctttctggagatagcttcggaacatccggcgcagccggatttcctcctcgggcatggtcaaggtcaagtagcggcggttgtagagccccgtcaggggatcgatcaggacggcctcccgaagggcttcattcgctttctccagctcgctcgttcgggcttggacgagcgattccaggaattcgttccggcggagaaggatcgccgtgcgccggcggaacgccagaacaaccgctcccgccaggatcagggctccgcccaattgggaccaccagcgccgccaccagggcgccaggatccgaaaagaaaagctttccggcgcgccggtctcggccgtcgtcgacaccgcccggacttcgaaccggtagtggccggcatccagcccgggaaacagggcctcggacacatccgtgttccgccaggcctcctccattccgacaagccggacttgaaacccgactccctccgtccatcgcgagccgcggagagcataacggaaagccatcgttcgggccggccaggagaccgtggggccgggatcggcgtcgtccaagaggcggccctgaccgtccttgctttcaaggaggacgacgcccggaggcgtctgcggctcacggcggagattcatggctccatgaaccaagcccacgctcaacccggcccaaacgtcgccgttcggctccacccagagggcgttttgggcgcagtcctcgccggggaagcccgcgttccgcccatatcgttcgacccggcctccttcccagcgcatcaatccacgggcggtcgcggcccagatcacgccgtaaggatcggcggccagggcgaagatcagcgactgagaaagagggtgagacgccggcagcagctcggccaagcggagagcgtccccttccctcctcacgcggacaagccgcttgccgctggagagggcgaaccaggcgctttcggagccgagggccaaaaccgacatcatttcctggtcggacaaggtacccttggggaggaccgcccaatcgcggccgttccaatgagcggcaccctggtcgctggaaacccagatgcctcccgctccgtcggggtcgatcttagtgatgaacggctcctcaatccagccgggaacggcgaacttctcgacgcggacgccggcgggaccgggaaaggcccgcaacagaccggcctcggcggccgagatccagaacgaattcttggaatcggaggccatcgtaaaaaacggccctcgcgtctcaatcccaaagacgggaacggtccaggcttcggttccgcccggcggaacgctcatcagtccggtggttcgcccgcctcccggctcgtgtcccacccagagcgttcccccggcgtcctcgtagagagagagaatctgacaccggccggttccagggacaagacgccagccttcgggggttccgaaagcgaggccgccccccgttcccgcccagacgcgtccgtcccgggttcggcagatcgaccaaacgacatccgcgggaaggccttctttccgcgtggcccagctccaaagagaatctcccagaagcttgaaaacgccgtctccacccgcccagagcgttccttggacgtccacatagaggacgaacgctccggtgggaggaaggccctggcgctcgcccagcactcccgatccggattccgaaacccagatcagattccgggcggtattggtccagacgcggccgaacgcgtcctcgaccaggaaaaaatgattgaccatagacagggattccggaaccgtcaccgcgaccgggggcgcctcgaaggattccaggcggtaaagccgttccgtcaggcggatccagatgcggccggcccggtcgacgagaagcattcgaatatccttgtggccttcggcgtcgtcgaaaaggacgcggcttttccaagcctttccatcccaggcccaaagcccttcctggagggacaccagcaggaaattgcggccggcatcgaaaaaggcgcaattcgccccgccgccccagggcaagcccttcagctcgctgaagctcttttcatccgtggagctgaagaagcgctgcttagcctcgaaatgagacagaatgatcgctccgccggggacggcgagacccggccggttgtcgaagcccgggaaaccgaaacctcccggacgcaggaatcgccggccgtcccaccggacgatccctttggaagtggtcgcccaaatgccccggggacggccgagggacaaggcttcgatattattggcgggaagaccgtcctcggttccgaagcggcggaaacgcttcccttcgagccggaagagaccgtcctccgtccccacccacaggaacccgtccaggtcctggaccatggtcgtgatcgagggagacgtgagaccttggtcgaggccgtagcccttgaatccgaaggccatcgccggatccgcgcccggcggagcggcggccggtccggatggaacgagggccaggaaaatcagcaggaaaaaaaacaccgcgaacggaaaggaagcccccggtcgccgtgccccgggagcaattctgtgctcgaccgaagtcgcctggaacatcgttttcggatggaatttacctttttcggtccgcggctgtcaaacaaattcgtcgccgaaggtctcccgtcgtcggatgatcattcggcggagatccgcggccccccccggccgcggccggctctgcccggtcgatcggccggattgacttcggggccgtcccggcataagattccggccggagaagatgccgtgtccaaagaaaaatccagagaagacaaggtcgagaaaagcctggccgtcatcagcgagggcgcctcgatggacggcgttctgcagtcgacggccgtcattcacttgtgcggctcattccacggccgcatcatcgccgagaacgagctgatcatcgccgccggcggcaaggtccgggccgacgtccgcgcgcgcaaagccgtcgtttcgggcgacttcgagggcgagatggccgtgaccgaggagatcgaaatcaccgaaaccggccggttcgccggaacgctcttccagcgggctcccggtctcgtcatcgcccggggcgggcgtttcgacggccggagcgttttcgtcgaagatctggacgccgtcgccgcgggctgggaagccggcggaaagaagggctgaggcgccgcccggcgaaagaccggtccggcgttccggcggtcagaacggccgccgggcgaaagtgatccggaagtccgagccgccgtcgcggaggatctcgagccggccgccgatttgggctaccagggcgttgagaatcgtcatccccagcgtttccattttccggatatcggccgtttccggaaaccccacgccgtcgtcgctgacccggagaaggaactcgccgctctccagaggcttcaagccgacgaggatttttccccgccgcccgccggggaaggcgtgcttgagggcgttggacatcagctccccggcgatcagggcgcagggaacggccaggccgaccggcaacatcaccggcacgacctccagcttcaggctgatccggtccggatcggccttgtagaactggaaaaagtgaatggccatgtcgtcgagaaaatcggcgaaatcgacccggacgaggtcgccggacttcatcagcttctcgtggatcatcgagatcgagcggatgcggagccggatctgccggaggacatcgagcgccgccggatccttaaggccccgggccgagagattgatcaggctggagacgagctgcatgttgttcttgacccgatggtggacctcgcggaggagaacctcgttttcctcgatcgccgcccgggccttgtcctcggcccgcttgcgctcggcgatttcattttccaaggcgacgatttttttttcgagcttgttgatcaggcgctcgttgtagagggtgagaatctccttttcatcggtctccggccccaaccggcgctgttttccatcccggatctcctccaggaggaggtcgatctcccggacgaatgtccgcggatcaacgggcttgcgataaaaacggtcggcgcccagctggagggcgaaccgctcgtccttctcgtcgacatacgtggccgtcagaaaaacgaacggcgtttccctcaggccctccctggaccggagctcgcgacaaagcgcgtagccgtccatcaccggcatcaggatatccgagatgaccaggtcgtacgcttctttttcgagcatctccagcgcgattttcccgtcggcggcttcctccacggcgtgtccgcttcccgagaaaaggcgggcgagcaaataccgggatttctcttcatcgtcgacaatcaggatcttcatcatctctccgaagatttataaatatttttccagaacgccgatgaacgcggccggatggatcggtttttcgacgtaggccgtgcatcccgcggccagcgctttttcccggtccccgaccatggcataggacgtcacggcgatgatcgggatgccggccagggcctcgtccgcccggattttccgggcggccgcgtagccgtccatcaccggcagctggatatccatcaggatcaggtcgggccgccgctccttggccagggccacgccggccgccccgtcccgggcttcgatgaccgcgtgaccaagcttgtcgatgataaagcgcatcatgtacaggttattctcattatcctcgacgatgagaaccgtcttcatcgcggatcctccttccatcggagaggcaggcggaagacaaagacgctgccgctgccgggctcgctggagaccgtcatccccccccggagcgcggtcacgatcttcttgcataggtagagtcccaagcccgtcccctcgtacgccttggtcatcgtcatgtcgatctgctggaaggggacaaacagtttcgggagatcctccgcccggattccgatcccttggtcggcgacacggacctcgagatattcctcccggacgtccgcttgaacgcggatgtcgccccggaggctgaacttgatcgcgttgccgagcaggttcatcagcacctgtttgaaccggcggacgtcactttggagaaacaagccgtccggcgcatcgaccctcacccgaagacccttggcctcggcttggggggtgacgctcttcacggtttcccgaacgacgtcggccgccgggaacgactcgatcgtcagatccatccgccccgattcgattttggagatatccaggatgtcgttgatcagcgccaggaggtgggtggcgctgctctggaccatggtcaactgttttctctgctccgtcgacacgtcgcccgacattcccatgaggatcaagccggtgaatccgaggatggagttgagcggcgtccgcagctcgtggctcatgctggccaggaacaggcttttcagccggtccagctcgatcagccgctcgttggccgcggccagttcccgggtccgttcctccacccggcgctcgaggccttcgttgagcttgcggatttcctcctcggctttcttgcgctcgctgatgtcgcggacgatgacgagatcggccggccgcccctggtaggagatccgggtggcggtgacctcggccgggatccgtccgccgccggcgttcatcaacgcggtttcgtacatcgtcggggtttcccgcccggccatccggtcccggtagtagcgcgtcaaccgctcccgctcctcttccgggatcacgtcgaggaacggccggccgagaaattccccggcttgacctctggccatggcgcccaggctcgggttgacatagacaaagcgctcgtcctggatgatgacgatcgcgtcctcggcgttttcgaccagagtccggtatttctcctcgctttcccggagggcggcaatcatccgctcccgttccgcatcccggctttggatctccgacagcatgctattgaatccgcggtggagaacgccgatctcgtctttccgcgcctcctccccccggacgcggatcgagaggtcctttgtccgggacacgaggcggatggtttccgccaggcgccggatcggccgcgacagggtcctctggctgcgagccgtcaagagcaaggccaggagcatgctggccagcagggcggccccggtcccgagcgcgttccggaaaaggatcatccggtactcggacaagtcgtaccggaaaaggacggtcccgatcggctcgtcgtcctgaagaatgcgccgtgaaaagacgaagaacccgccctgggtttcctcgtagtcgcctccccgttgcggcggcggctccgccgccgtctccttcctccggtaagcagcgaacggccggccgccggcatccaggatccaggcgtgggttacgagcgcctcggcttccagcgagcggagcgttcgggcggcatccacgccgtcctggaagagaagggccgacgtgcagttgtagccgaggaggttggccatcgattcaagcttcgtccggagggagttgcggtaaaaccgggcggaggacagaacgttgaatccgctgagcaggaaaacgacgatgaagacgacgaagagctgcaggaagatgattttccgggccagggacaggtcattgaatttcatcgccccggggccgccttatccccctcgaccaggagggccagacgcagaagctgggagccggcctggatgcccgcttgcttcaacgcatcgaggttgatctcaaacttgacgtgttcgtcgcgcagaacgaagttgatcgccgccccgcgccgggccaggccctcggtctccccgacgacgatgacgctcgtcccccggaacttttccagggcttcggggaggaggaacgcggaggaatcggacaggaagagaatccggagccggccggcgtctttcaactcctcgcaccgccggaccaggaggagaacggagccgttggttttcttctccgagatttcctggagcggctcccaaatcgcgctgtctcccagcacgacgatcgggcagggctcgcggtcgaattcgccgggccattggaggtaacggatgaaatggtaaagaaaaaccgccttgaccgcggcttccgaagcggacgtgtccgtgacgagggttttcccggccgggacggccggcgggccggagagaaacacggctccggcggccgcgagaatccatccgatccggaaccgcgccgtcttcatcactggaacgaataccccgcggcgaggcggaacgagcgcggcggctgacggaagcggctgggcggcaggttggaaggatgaaaataaacggcgtcgaaaagattatcgacgacgagttggatgtcaaaacccgccggcagacgccaggagagggcggcccgggcgacgaacgctccttcgatccggtcgctccccgtggaggggatgatcttgggattcttccgttccccgaaataacagcctcgcaggctgagggtcaagcgcggggtgaaggcataagccgcgccgaaggtggcgcagtgggcagcgatttccggcgcctgttcgcccgtttcgtccagggaagcggtatacgtgtagtaggcccaggccctccaggagccgcggcggaagaggagcccggcttcgccgccgtccgtcgtcagggctccggcgttgatccagcggctgttcgtcgtttcgtcctcccgactcaggagattcgtcaagcggttgcggtaaacggacacgtccagccgcaagaacggggaaaaggaccagccgccggcgatttcaaacgaatcgattttttccggccgcaggccgggattccccgcgccggccgcgtaatcccacggcttcggcgcccggaacgcccgcatgtacaaggccttggccgtcagtttccccccgttgtaaatcacccccagccgcggggtgttcaccgcgccgtaatagctggagtcgtcgtgccggaggccgagaaaaagatcaaggcctttagccggggtcccttggatctgggcatacgcggagaacaagcggttggtcatcatggccggggaaagcggaaccgccgggagggcgtccgccgatgagctcacggtgacggaaaatccctcggccagccgttcccgctccaggacgaggccggcggagaagcgccagcgcggatccggcgcccattgaacctgggtttcattgccgatcaggctgttgggccggtagcaacggaattgccggcccggggaatcggaagtcgccagctcgatttccgaaacggtgtcgtccaggacggttgaattccggtaatacgccgtgttgcggaaggaccaagtctttatcttctcgtaggaatagcgggcccagacattgatgaaccggatgtgccagttgacgccgtggtcgctccagggaatggaaagatcctctccggccgtcttttccaccgtcgcccgcgaggcgttttcatcctggaggagaaacccggcctcaaaatccttgaaatgaacgcgggcttggacggccgcgtcgttttcgaaattctcgatggcctcggtccagttgaaatcgccggccgctccggccaaatcggctttctcgttccgcttgagcatcgccgccgccgtgaatccgaaatccgcgtttttatcgtaatacccgtaacgggcgtcggccagccgcgcgccgaaggttcccaagccggccgaaacgcggccccttgagccggcccgcggatcccgggtgacgatattgatgatcccggacagggcgttggttccgtacaaagctgaagccgggccgtagatgacctcgatgcgctccacctcggccaggttgaactggcctccgccgtagaatccgcccgagttcagctcgttgatctggagaccgtccacgagcaggaggatcttgttgttctggccggggactccccggatgaaggaataagagttgaagcccaggatgttccggaattgaaacccggggaggtcggccagggcatcctcaagggtcagacagccgttgtcccggatttgctcggatgtgatcacccggacggtggccggggttcgggcgatcgtttccgggcttttcaaggcggaaacgactttcaggtcgagcagctcgctgagatcgagagccagcaactcgtccaacgttttttcctgagccgaaaggggaagaaccaggcaaatgagtccggccgaggcgaaaaaaaatttcgcgatccgcttcaactccggtctccttgaaccggggtccgacgccggcaggcagtccgcggcggccggaaaacgaatccgctggaatttctacagagacagggaacgatgagaaagaggacgcgtctccggccccgccttccgcccgccgtcggatcccatggcttcactatatcttcaggcggccgggctgtcaatcggaccggccgccgattgacacctcccggcaattccgctatcgtacatttcttttggccgtgtcatcccggttccgcatgggcggaacagaacataaagcggaaaaggagggatcatggcgaagcagacgatcatctggacggagacggacgaagcgccggctctggccacctattccctgcttccgatcattcagggattcaccaagggatcgggcgttgaagtcgaaacgcgcgacatctcgctcgccggacgcatcatcgccaatttccccgatgacctgcgggacaatcagcggatccaagatcacctggcccaattgggcgagttgacggcccggcccgaggccaacatcatcaagctgccgaacatcagcgcctcgattccccagctccagggcgccatccgggagctccagtccaagggctacgccctcccggactatcccgaacgcccgcaaaacgaagcggaacgagtgatccaggcccgttatgccaaagtcctgggaagcgccgtgaatcccgtcctccgcgagggcaactccgaccggagggcgccgctttcggtcaaaaacttctccaagacgcatccccacaagctgggtccctggaagccggattccaaagccagcgtggtccacatgaccgccggagatttctacggccacgaaaaatccgcggtcaaccaaaaggaacggccgatccggatcgaactcacgggcaaggacgggacggtcaaggtcctgaaggaggatttgaccgccctcccggatgaaattctttcggcgaccttcatgagctggaaagcgcttcgaaaattctacgccgaaaaaatcgaggaggccaaggcccagggtctcctcctgtcgctccatctgaaggcgacgatgatgaaggtgtccgatccgatcatgttcggccacgccgtctcggttttttatcaaaaagccctggacaagcacgccgccgtgctcaaggagctgggggtgaacgtcaacaacggcctgggcgacgtgtacgcgaaaatccaggtcctcccggaggcgaagcgagcggaaatcgaggccgacctcaaggccgtctacgccgagcggccggccctggccatggtcgattcggaccggggcatcaccaacctccacgttcccaatgatatcatcgtcgacgcctccatgccggtggtcgtccgcgaatcgggccggatgtggggccccgacggaacgctccacgagacgatggcgatgatccccgaccggtgctactcaacgatctacaaggagatcattgaaaattgcaagaaattcggggcgttcgatccggcgaccatgggaagcgtccccaacgtcggcctcatggcccagaaagcggaggaatacggctctcatccgacgaccttcgagatccccttcgacgggaccgtccgggtcgtcacaccctgcggccggacgcttttagaacacgaggtcgaggccggcgatatctggaggatgtcccgggccaaggatattccgatccgcgactgggtcaagctggcggtcaagcgggctcgggcgaccggcgccccggccgtcttctggctggaccgcaaccgggcccacgacgctcaagtcatcgctaaggtcgagcgctatttgaaggatcacgacacgaccggcctggacatccggattcttcccccggtcgaggcgatgcgccattcgctggaccggatccgcaagggccttgataccatttcggtgacgggcaacgtccttcgggactatctcaccgacctcttcccgatcctcgagatcgggaccagcgccaagatgctgtccatcgtccccctgctgggcggaggcggattgttcgaaacgggggccggcggctccgctcccaaacacgtccagcaattccaaaaggaaggctacctgcggtgggattcgctcggggaattctcggcgttcgccgcctcgcttgagcacctggccggcgtcttccaaaacaagaaagccaaggtcctggccgaaactctcgacgaggccatcgccaaattcctggaaaacaacaaatcccccgctcggaaggtcggacagatcgacaaccgggggagccactactacctggccttgtactgggcccaggccttggccgcccagaacaaggatccggagctccgggcccggttcgagacgatcgcccggcggctgggggaaagcgaagccacgatcgcggccgaactcctcggggcacaggccaagcccgtcgacatgggcgggtattaccggccggaccggaagaaagtcgagacggccatgcggccgagcccgacgctgaacgccatcatcgacgcgctctgacggccgccgcggaaaacggccgccggctcaacgaccgagccgggcgtccagctcggcgagtctcagccggacgctgacgatatacggctcttcgttttccgtccagtggccgtacgccgtggcgacaatcgtgccgtccggcagaacctccacgcccgaataggcgcaatcggcgtccttgtgattcttcatcaggcgaacgcggtattgtccctcccggccgcctctgaggtcgtcgtacgcgccgatccaggcaacccagtcgccccgggtcggactgtcgggcgccatgtcccggaagcttacgaaaaggcgcccgtcgggagcgtatttcggacaatggcggtctcccgtcagggaccccgggagctcaaccggggttgaccaggaggctccctcgtcccgggaaaacatcacgtgggaattctttcggcgcgaattttcccggagcaggacggccagctcccggccgtcgggcgaacggagagccccgggctcgcaaagatggagagccggactgctccagacggcctcgggttccgtccacgtcaggcctccgtcattggaaaacgtcttgtagatcgtaaagacggccggatcggacgggccggaatcacggcggaaaaagcggccgtcgtcatgaaaaagccccaagtatccgccgggccggttcaaagaaacgacggatgccatgacgacgatgccgccccaatcgcccgccggccgcagaggcgaccacgtctccccgtcgtcctcggagacggccagccgagccgggtacaagcccgaccagacaatcagccgctttttcccggaggcctcgacgacccggtggatagtgggcgtttccaggctcgtcgcccaattgtccggaacctccagccgcccgttccaggtcgcgccgccgtcgcggctccgcttgacgacgatgggcccgcggccgtggcccttgggataaaccgccaggagggttcggccgtcttccaggagaacggtcgtcggatggccgaggtattgcccggattcacggtcgacgatcgttcggcggcccgcctcgccggccaggtcgatcagagggatccggccttcggatgaagcgaaaagcgggggcgccgcgagagccgggggagcgagggccaggaacatcccggctaaaaccgtcccggcgcgccgccgtccggaccgggcctccggcgttttcaccttctcagaaccggagcgaaagacaggtcaggccgccgtccatcttccgcatctcgcttgtgtcgacctcgatgaggggaagtcccaaaccggcgtatttctcgagggcccggggaaatccccggggaacgagcagggtgccgttgacccagagggtgttggcggcgtagtcgtcgccggggtcgagaacgatccggtcgaagctgcggaaaaattcccggccctcgaaacgggaggcgacgaccagggtccgcccgcccagggtgttgacgaacgacttcaagtgcagccctttctcgaccggaacggccgtccaggaatatccgcaagactcaaggatccgccccagctgcagggccccgtcctcattggtccgcacggagagcccgatgaaaaagcgcccgccggcccagaggacatcgccgccctcaagcgttcccggaaggtcgattcgggccagccggcggtgccgggccagggctgattcgacggaggcggtttcgccgcgccgggagggcgcccccggccgggtgagcacggcgatctccggaaggacgacggccgcgtcctcgacgaaatacgcgtccggaaagcccggcgacgccggcaggacctcgacctcgaggccgaggccgcgcagcgtttcgatgtacgcggcgtgttgggccaggagcagggccaggtcgggttttcccaagccggccgtggtcaagccggcggccgcgtccggaccgggggttcggacgatcgcccggcggaagggtttcgagtccgccggtttccgttgtgggtcggggttcttgttcacggattctccttccttttcgccgcggctcactccatctcgatccggccctcgaggtaggcccgggcccggccggagatgtccacccggtcgccgcgcaggcgcaccttcagccggccgccgcgccgggaaagctggaccgcctccatttccgtctttcccagcttctccgcccagtagggggccaggctcgtgtgggccgagccggtgacgggatcctcgtcgatgcccacctgagggccgaaaaaccgggagatgaaatcaacctcggtcccgcgggccgtgacgatcaccccgcgggcctcgacccggccgagctttccgaaatccggccgcatcgcttcgatttcggcttgtgtcccgaacaccgccaggcaatcggtcttcccccggaaaatttcccgggggcgggctccgagggcctcgctcaagccggccggctccgcggccggccggagcgtgtcgaccggaaaatccagcgtcaggagatcgccgtcccggcggacgcgcagaatcccgctccgcgaatcgagggcgatttcgttttcgggatagcggtcataacggaaaataacgtaggcggccgccagcgtcgcatgtccgcaaagatccacctccacggccggcgtgaaccagcggattccgaagcgatctcccgttggaacgtaaaacgccgtttcggccaagttattttccatggcgatgttttgcatgagcccgtccggaagccaggattcgagcgggcagacgccggccggattgccctggaatacctccgaagtgaaggcgtcgacctgatagaagaggaggctcatcggccgccgtcccggtcccggccgtaaacgccggcggcgtcccatttcttgacggcgtccaggatcagctcggccacccggtcgttgacccggcggaaataatccttcgcctgggccggatcgaatgtcgggtatccctggcctttctgataaagaaggatcgacgtcgtcaccgggtgggcggcgaaagccccggccggagccggcagcggcgcggccatctccggccggtagcgctcgggatgaatgtggttcgggacgatcgcctggatataggccgtctcgttgttgccggcgtggccgccgtcctgtttgaacacgtccttggtgatgtcgtcggccagggtccaccagttcaccagcaggatccggacccggcgggcgttggacacaagagacgagacttcgtttaaaacggccgtgtttcccccgtggccgttgaggatgatgacgttctgaaagccgttgtcgtccaggttctccaggatctcccgggcgaaggcggcgtaggcctccttggaaatcgagaccgcgccgggatacgccttcatgtcggccgtcattccatagggaagcgtcggggcgatcagggcgtcgacccgtccggcgatatcccgggccatggcttcgggggcaaggctgtcggtcccgttgggaacgactccgtgcggttccagggatcccgtcgggagcagcacggtccggatccgggccgggacgagctcgccgaactcctgccagcagagcaggttcatctcgcgggtggagggcggggaatccgcggacacgccggggagcaggccggcgcagactagcgccgccgtcaaaaggaggagggctttcttcatggtttaacctccttaagaaatcccatcataatgcatttttctccgtttctgaagagccccggcgcaaaagagaacttttcgcgctttttcgacgtatacattgaaggacacccggccggaggaaaaagccggcgcgggctggcgaatgccggcagcgggcttccggagaggaagatcatcaaggagaccggagatgatgaataaagacttcaaaaggattttcgtgctggccgccctttggccggtcgttttcgccgcggcgaaacaaaggccggttcccgctccggagccgggccagaagatcgtccaagccttccggctggaggaaccggtcaagatcgacggccgcctcgacgatagcgcctggaagggcgagggagcgaacggcttcacccagaacgatccgcaggacggacaaccgtcgacggagacgaccgaagtctgggtcgcctacgacgatgaggccttgtacgtggccgccaagtgccgggattcggaaccggataaaatcacgggcctcctcggccgccgggattcgatggtggaatcggattggttttacttcgccgtcgatccctattacgaccgccggacgggatacatgttctgcgtgaacccttccggctcgatcatggacttcgcccttaataacgacatcgccgacgacagctcttgggacggcgtctgggaatccaaagccgcgatcgacggcgacggctggaacgtggagataaggatccccttccaccagatccggttttcccgtatggaggaatacgtctggggcgtcaacttccgccggaaaatccggaggaaaaacgaaacggcgtccttcgcctggtgcccgaagaacgaaacggcgttcgtttccaaattcgctcgcctggagggcatccgcggcatctcccccggcgttcacgtggaaatcactccgtacgccaccggccaggcccagttccgcccggccgaggagggaaatcccttcgaaaccggccgaaaagcgtccggcaacgccggcttcgatctcaaggccggtttaaaaagcaacctgacgctcgacgccacggtgaatccggatttcggccaggtcgaggtcgatccggcctccgtcaacctgacggcttatgaaacctattacgaggaaaaacgcccgtttttcatcgagggcgcgtccattttcaacgacttcggccggggcgggatttatttcaacgccaatatcaactggcccaatccgaagcttttctacagccgccggatcggccgggagccgcagggatctccttccggagaaggatatgtttcacttcccgaccgctcgacgattctcggggcggccaagcttaccggcaagatcggcggctggaacgtcgggttcatcaacgccctgacctcgcgggaatacgccgacatcgacctgtccggcctccgttccagagaagaagtggagccgttgtcatattacggcatcttccggatccagaaggacatcgacagcggccgccacgggatcgggctcttggccacgggcgtcgtccgggacctcgataacccggccctcgaaggccttctcaaccggaacgccttcagcctggccgtggacggatggtcgttcctcgacgctaaaaaagactgggtgttcggcggctggatcgggggaacgcggatcggagggagctccgagaacatcctccgaatccagaattcctcgatccactattatcaaaggccggatgcggcccacgtcgaagtcgacccggcggccgtctcgctttcgggctgggggacccgcgtccacctcgccaagcagaacggccggttcatctggctttcctccttgggaatgctttcgcccggattcaatcccaatgacgcgggctaccaagccggaacgtccgacgtcatcaacgtcagcgtcgttcccggcctcaacttcaccgagcccggcaagattttccagcagatcctcgtcggcgccggcggattcgccaattgggatttcggcgggcacaacgtcggcaagggaggaatcctcatcgccgagggattgttcaagaacttctggtatttttccgcccagctcttcgccggggccgggtctctgaacaaccggcagacgcgcggaggccccctgacctggacgcccggcatggggaacgtgttcctgatgctcagcacggacgggcgcaagaaagtcgtcctcgaaggaagcgggggcatcaccgacggaggccgggacggccgttcgtggaacgccgggctctccctccgctggaagccggcggccaacgtcagcttttcggccgggccgtcatatctcgccgagacgaacgaaacccagtgggtcgaccgcttcgccgacgcctcgatgacgcccacgttcggaaaccggtatgtcttcgcccggctcgaacagagagtcgtctcggccgagatccgcctcaactggacgttcactccgcggctgtccctccaggcctacctccagcccttcatcgccgtcggagcctacagccggttcaaggagctggcccggccggccaagtatgaatacaatctgtacggcgaaaacagctcaacggtcgaggaagccggcggcggatataccatcgatcccgatgggacggggccggcctccccgttcaccttcggcaatcccgacttcaacgtgaaatccctgaggggcacggtcgttttccgctgggaatacctccccggctcgctcatttacctggtctggacccagaaccgggcggattatgccaattccggaatcctcaacctccggcgggatttctccgaccttctcacggcgcccggcgaaaacatcttcatggtcaaggtgtcctaccgctggaacatgtaggggctcccggtttcgcgccttcccccgtccggcggccgggggaacggccctcagcggaaatcggtgttgaagagaggcaggacccgcaggccgggcttgttctcccggacgatattgacgagtccgagctggattcccttctcgatccggcgggcgtaattcacgattccgatggaaaggccggtcagcgtccccttgagctggttgaaggggctgacggcgacgccccgcaggcggccgtcatcgacgagcttgattacggccccggcggcgaagacgccgctcagccggcggccgcccacgccgattccggcgatcgccaggccggccacggattccgctccggccccgattccggagatggagattccggccaggcgttctccggcgccgacgcccagaccgccgatgttgatcccggtgacgttcttgccggctccgacgcccaaccccccgatgttgatcccgaggacattttcgcccgctcccacgccgagcccgccgagattgatccccgcgacgctgccgccggcgcccacccccaggccgccgaaattgaagccggagatgtcttcgccggcccccacgcccaaaagtccggccgagactccggcgatgctccgattgccggcgactccgagcaggccgagctggactcccctcatgcggccggccccggggatcaatcccaaggacagtcccgtcacggtggaatcatcttcctcgccgagcgtccggggagtccacagggtgacattgacgccggtgatccggatcaccccgcggtcgcggaaattgaaccgcaaaccggtgaattccttggaattgccgaagctcaggccccattttttcgatggaatatcgaggctttgggccgaaacggatccagccgcggccgagaaaagaacaagggcaagacaagcgccgagccggcgggccttttcagtcaagggaaggaagctcattttggaatctcctgtctattttgggaaagaaggcattgattaagacgtatttcacggcgattaggttcctaggcccgcgttcctccatcgggcggattccgccgcttggaggaaacggagtgcccatctgatgtataatactctttcatgaacgaggctttgaaatccctgaaggaccggctccgacggccccttccgggccctccggcccagcttcggatgatgcccctccccccgccgcccggccagaaaacctatgtcgaggccgggggcgactgtcttcccggggcggtcctcgcccttctttatccccggaacggaaaaacccatctcgttttcatccgaaggccgcaaaacgtcgttcatcacaaggggcagatcgctttcccgggaggccacgtggaaaccggcgagacgccggccgaggcggccgtccgggaagcgatggaggaaatcggcatcgtcccctccaccctccgcctcttgggggccctgacgccgctgtacatcccccccagcggatactgcatctatccgttcgtcgccgaaacggacgtcccgccggccttcgtgccccaaaccggggaagtcgatgaaatcatcgaggcgccgctcgccgatcttctcgacgatcacaacctccgccgggaaacatggacgttcgagaccggcccgcggctcgtccccttcttcgccgtcggcccccacaagatctggggggcgacggccatggttctctctgagtttttggaaatcctccggccgcccgacggccgatgaacgcccccttcggccatgccgagaaaaggagaaaaaatccgatgaaaaagatcctcctgttcgttctcattcttgccacggtgatcgtcgccgccgtcctcgcccgcccgccgcagacggccgccgccgaggtcaaccccttcctggttgaatggacgacgccgtttgagaccccgccgttcgacctgatcaaggaggcccatttcctgcccgcgttccgggaagcgatggcccggcagaaaaacgaggtcgccgccctcacctcctcgatcgagccgccgaccttcgccaacacggtcgaagccctggaacacagcggggcgctgcttaagaaagtcgcctacgtctttttcgccctgaccaacaaccacaccaaccccgagcttcaaaaaatcgaggccgagctggccccccttctctccaaacactccgacgacatctccctcgacccgaagctgttcgagcgggttaaagccgtctatgagaagaaagagggattcggcctcagccccgagcaggcccggttgcttgatttgacctacaagcatttcgtccgcagcggagccgccctggacgaggcgaaaaaagccgagctccgcaaggtcaacgaggagctggccgttctgaaccaaaagttcggccagaacgtcctggccgaggacaacggcttcaccctcgttctcgacaagaaggaggacttggccggacttccggaaggcgtcatcgccggagcggccgaggccgccaaggagcagggacaggaaggccgctgggtgttctccctccacaagccgtcctgcattccctttttccaatattcctcccgccgcgacctgcgggaaaagctcttcaaggccttcatcagccggggagccaacggcaacgcggccgacaaccgggccatcgcttcaaaaatcgccgccctgcgggtgatccaagccaaccttctcggctacccgacccacgccgattacgtcctcgaggtgaacatggccaagacgcccgccggcgtctacaagctcctcgaccaggtttggacgccggctttggagatggcggaaaaggaagcccgggagctcgaggcgttgatgaacaaggacggagtcgttggaaagctcgagccctgggactggtggtactacgccgatcagctgaaaaaagccaagtacgacctcgacgacgaggccttgcggccgtatttcgagctcaaggccgtcctccggggcgccttcgacacggccggcaagctctggggactgaccttcacgccccggaccgacatcccggtctaccatccggacgtcgaggtcttcgaggtcaaggaagccgacgggcgccacgtcggcattctctattcggactacttcccgcgtccgtccaagcggggcggggcctggtcgagcgcgatccggatgcagtcggtccaagacggccggcgcgtcacgccggtcgtctacaacgtcggcaatttcaccaagccgaccgccgaccagccgtcgctgatcaccttcgaggaagccctgacgcttttccatgaattcggccacgccctccaggacctcttgtccgacgtgacctacgagtcgatcggcgggacgaacgtcccccgcgatttcgtcgagctctgctcccagatcatggagaactgggcggccgatcccgaggtgatcaagacctatgccaagcactaccggacaggcgagccgattcccctggatcttctggataagatcgaaaaaaccgggcagttcaaccagggcttcacgaccgtcgagttcgaatccgcctgttacctcgacatggcctggcatacgctggccgaggccgccccccaggacgccgtcgctttcgaggacgcccttctcaaaaagatcggaatgatccccgaaatcatcgtccggtaccggaccccgtattttgcccatatcttctcgggcggatattcggccggatactacagctacctctggagcgaggtcctggacaaggacgcgttccaggcattcaaggagacgagcctttttgatccgaagacggccaaaagcttccgggagaacatcctctccaagggcaacacccgggaagcgatggattcctacaaggctttccgggggcgcgagccgaaagtcgaagccctgctcaaagcccgcggtcttttgaaaagctgaatcgcgcgaccgctttcccccgggggaaggccttcgggccttcccccttttttcccgccggccccgcccgtctccttgacatggagcaaatcacgcccgtcgcgattctcctcttgacaaaacatagaaatccacacaaaatagtgtatattaacatgttggaccctaggttttgtggacataggggctcattcatccgatttcattcacttgactccccgtcaattcccccgccctggaaaacgtgatgcctgaaatccggccgaaagactctacgacatccccccgtctgagagtcctcgccgtcgacggccgccccggccgccttcattccttcaaaaaagcgttgaacgggaacgccgatctgatcgccgcgatcggtccgttggaggctttttactgggcggagaagctccagacggtcgattgtttgatcctccgtgacccggcttccatctccgccgagccgggggcgtttctccggtcccttctccaatcgttccagagcacggaacggatggtcaagatcgtggtcgccggaccggaggaggtcgcggcccttcgccggtcgctcctgatctcgccctccgacctcgttctcgagagcccggtcgaaacggaagctctctgtctggaggtccggaagcgcttgtcccggctggccgtggaaaagagggccgttgtccgcattcccatttccgagaaaaatcccatccgcgtcgaaatcgagggcggcggcggaccggccgtcgtgcgcgacctgagcgaaacaggcatgtttctccaaacggcggccggcctgggcgtcggggcgaggcgtccattcgtccttcacgtcgccgacggcgaatgctggaaagtcgagggaatcgtcgtccgctccggagagggcgagggaggcgtcggcatcgccttccgcccggccgacgaggaggcccgccggaaaatcttctcccgcctggccgaaaccgtttcccccaaggacttggccgagctcaagctgcgctatccggagcttcacacctcggccatggtcgccttctcctctccggataaaatccgggggctgctcgccggtgcccggcgggcccggacggaaatcaccgcccttcccgcccatgtccgacagccggcgaccctcactctcgaacacgtcgaccccgggagaatctgcgtcctgagcggaaaaagcctcaacctccatttcaagaccggggatcccgtcttcatgtccttccaatccggatatgccacgtataatttcgaaacaacggtccggcgcctcggcgagaacggcgatttcctcgagtgcttctatccccggatcctcttctactcggaaaaacgctccttgaagagggaatcgccccaagacggtctccgcctggaactggttctcccgcccccattttcggccgggatctcgggtccggtcgtcgacctctcggataccggggccagcttcatcgccgatgccggcggcttggccctgcttcccggcacgcccgtcggcaccgtccggatcttcgacaacggccgcttgatccgggaagagcggggcgaaatccgccacgccgtccggacggaagaggacggatccccggccttccgctatgggcttcagttcggcatcggccgcttgagcatccaggcggtccacccccatcggcgcagcaccgacgtcccccccgccgcggccgccgagccgggaagcggggccgatcccgggctgccggacattctccgcgagctttctcatcgtcctcccgccgtcatccgcctggaaaacgagcggggggaagaaatcgtcggcctcttgaatacatcgtacccgccggacggaaatcccgtgcccgtcgtgatcatcccgcccgctttcgggaagacgaaggaaacattgttcggcctggccctgaccctagtcgaaaatttccgccgggccggccggcggctggcggttttccgctacgacggaatccggtgcaaaggcgaaagccacaaggatcccgaggcggccgagccgccgttcgaaatggtcgactccagcctcagccagggagcggcggacttgaaaacggtcctggaatggctggagatgaatccgacgatcaaggccggtccggtgatcctggcgacgttctcgctttccgccttggaggcccggatcgccctccgcgatcccgccgtgcggcggcgcgtccattattggatcgcctgcatgggcacgctggaattccgcgacctgatgaaccgcgtcaactgcgggctcgacctgctcgagcagcaccagctgggcatcgatctcggggtcattcccatcctcggcaacttggtcaaaatgaggcattacgcggccgacgtggtcgcctccggggtagcgaccctcgaccaagcccgggaagacatgcgccacctcaacctcccggtcacctggatctacggaaaacacgataattgggtcaaggccgagttcgtccgcgacgtcatgagcatcaaggccgaggcttcccgggaagtcttttccgttcccctgggacataacgcccggaactccgaggaagccctgcggctgttcgggacggtcacctccctcgtccatcgcttccttcacgggacgatgatcgaggcgatcccgccggagcggaagaatctcgaatatctgaggcgggcggagaaggaccgtctcccgggccggattttgaaaaacaagcacacctactggacccattacttggtgggggaaaaaggtcttctcggcttcgacacgatggccttgtcggacgattacgtccggctcatggaggatcagcgcaaggccttggctttcgatccggaggaccggttcctcgacctggggggcggcacggggaatttcatcgcccacatcctccaaagcggaggccccctgccctcgcgtctggttctggccgacctggtcccggaggcgctggcccgggctttcgacaagctgacctccctcgagccctcgctgaagaacgccggccggctgtccgtcctgggcctcgacgtcgaattgaaccgattgatacccatccggaggttcctcgccggcgaaatcgggcggttcgaggacttggccgagcagatcgaaaacctgcccctccaatccgccctccggatcgacgcggcctactctccccgccttcaccggatcctccggggcgaggaaatcactcccgagacggagcgctttctgaaaagcaccttcgagctggccgaaggccgcgtcatccgcgacttcaatctggccgcccgctggaccgccggtcttgccccggggcatccggctttccgcaagctggccttccccggcggccgggaaaccgctttctttctgccgttcaaggaagagcgattcgacaagatcctgatgagcctcgtcctctcctatattttcaacccggtcgaaaccctccgggaagtccgccgcctcatcgcccccggggggcgcctcgtcctgtcgagcatgcggccggataccgacgcgtccggcttgttcacccggcttttggaaaagatcgaagcggccccggaggacgcgctccccatccccggtccgaaaagccggatcctcgaatcgatgcggtcgtttctcaacgatgcccaggctctcgtggatctggaggaagccgggacattcgatttcttcgatcccggcaagctggagcttctcttgggagaagcgggctggactcaggtcgagattctgccttccttcgggaatcccccccagggatacgtcgtcgtcgccaaaccgaggaactgacatgaggaacaaggataagagcctcttcgagcggctgggcgaggaatacgacctgcgcgggcgcacccagtgggtcattttcttcagcgccatcctcttcgcggcgttcatcctccttgaccgcttgtacgtcccgccgatgtttcacacgttcctcttgatccgtctggccgttctcgccggccatggcctgctgttgctcatcctgaggcggacgcgatccaaccgcggggccgagatggtcgcgatcgccctgacggtcctcgacgccggcgggatctcgatcatgatccagatgctgggcggagtctcgacggcctacgtccagggtttatacctggtcatcatgggcgtcgtcgtcctcgttcccctgcgcttcgccgcctcggcgtccttgtacgccctgatctggctcggcaccgccgtcccctcgattttccggccgccggcctccggtttccaggaacgggcgacggtgtccaatctgtttttcttctcgtccgtcatcatcctgggtctgatcggttcctacatcatggaaatcatgcgggaacgggagatcaccgcccgaacccggctggaggaaacgaccgtccggttgagggaatcaaacgaaaagctgaaaaccctcgaccaggtgaaaatgcagtttttcgccaacgtcaaccatgagctccggacgccgttgaccttgatgatcgccccgctgagcccgatgatcctgggccggatgggttccgtcaccgaccttcagaaagaaacgctggattccatccgccgcaacgggtaccgcctgctcaagctcatcaacaacctcctggatctcaacaagctggaagccgggcggatgcggctccggccgaaaaccttggaattcaacgattacgtcgaaaccctcctcgcctcggtcaaggtcctggccgaccaaaagaacatccgcctgtttttccagcatcccttgaccgaagtcgagctgacgatcgatcccgaccagttcgagaaggtcgttctcaaccttctctccaacgccttgaaattcaccccggaaaacggccgggtcaccctgtacgtcgaggagcgcccggaaaccgttctcctcacggtggaggacaccggctccggccttccgagtcacatgctcgaggccgtgttcgaccggtaccggcaggtggagggatcggccgcccgggcggggacgggaatcggcctggccttggccaaggaggtcgtctccctccacggcggattgatccgggtcgaaagcgagccgggcgaggggtcccggttcatcgtcgagctcctcaagggaaccaagcacttctctgaggaggttatggaccgccgccagtccgatcagcccgtcgccttccggaaacgggcgaccgacatcgagccggaaggcgtccgtgtccaggacatcatctccaatgtccgggatttgcagctcatcgacttggaaaaagtcgaatttccgatcaccccgccggcggagcgccgccacgagtaccagcttctggtgatcgacgacagccccgaggttctcaagctgatgcacttgctgctcaaggatgaattcgacctggacttcgccctgaccggagaggacggcctgcggattcttcatgagcgcggaccggacctcgtcctcagcgacgtcatgatgcccgggatggacggccatgagctctgccggaggatcaagtccgatgaggcggtcaggcacacgcccgtccttctggtgaccgcccggtcggcctctgaaatgctggccgcgggcatggagtccggggccgacgattacatcgtcaagccgttcaacgccgtcgagctcaaagcccggatccggtcccacctccggatgcggcaggttgaggccgagctggccctggccaaccgcaacctgaagatgcggaccagcgacctcgtcgaacggcagcggatgctcttcatctcgatggtcaagtcgctcgtctcggccctcgaggcgaaggatttctacacgaggcaccattcggcccgggttacggaattctccctgaagatcgcccgccacatgggcttcggcgaacgcgagctggacgacctcgaattggccggcctccttcacgacgtgggcaagatcggcatcccggaaaacatcctcaacaagcccgggccgctgaccggcgaggaatacaaggcgatcaaggatcatcccgttttcggcgaaagcatcctgaagcccgtcgtcgagctgacccagatcgccaagatcgttcggtgccaccacgaacggtacgacggcaagggatatccggacggcctgaaaggcctggaaatccccttgggggcgaggatcatgaccgtggccgactcttacgacgcgatcacctcgaagcggccgtaccgcggcgaggaatcccaccatttcgccgtcaaggagatcatccgctgctccgggtcgcaattcgatccggaagtcatccagcacttcatcgaagtggccaagacgttctcaggactgggtcccggcggaacgccttgagaaggagaaacggagagctcgtgctagtcgacgatgaggacccgggccccgaagcccgagcgggccaagtggggacaagcttcgtcgtcttccgcctggaagctcatgcccgcggtcaggacgaattcccggccgtccttcagggcgaccgtgatttccccgtccaggacggtgagagcgtggccgcgggcgcaccagtgatcggaggcgaagcccggggaataagccaccatccggacccggaggttgccggcttcaaccgtccgccagaacgacgtccccgaggcgcccttgtgctccacagccgggacggagccccagtcggtcacggtgaagggaacgccttcgattttcaccggccggccgccttttccccgctccgctccagggctttcctcatccgggcgagaaaggcctcggcgggttcaaaacccgttccccgcagctcctcgatttccgtcccgtccggacggagaaagaggagggtggggacgccgcgaatgccgtatttctgagaaaaagccttcaccttctcgtctcccccggcggtcaggtcggccttgagcatgacgaagctccgggaggccgcgacgacgtccggccggctgaaggtcatccggtccagctccttgcaggggatgcaccaatcggcgaacccgtcgatgaacaccggctttcccgccgcggacgcggccgcgagggcttcctcgctgtacggccgccaggcgatggcttccgaaacgaggccggcggcggcgccggccgaggccgtcccgccgacgtattcctccacgccccggacggcgaaaaggagggcgagaacgaggaagacgacgcctgtcagggcccggacgtacgaaaacgccttcccgcccgtcttcgtcggctcgatccagccgagatagaggccggcgaccagcatgatcagggccaggacgaaatggtagaaaagcgtgttcgggaacagggtcttcaggaaataggcggccatggcgatgaggatgaacccgaaaatcttccggacccagatcatccaggcgcccgagcggggaagccggcccagggcgccggaaaagacccccaggataaggaaggggacgcccaggccgagggccaggacgaagaacaaggagaagccgagcaagacatcgccccggttgccgacgtacgtgagaagccccaggacgaacggcccgatgcagggggcggcgacgatcccgacggtcaagcccatgaggaccgtgccgaaatatcctttttggcttcctccggccaacgtgttgagaaaagcgggcatgcggaattcgtagacgccgaacatgctgagcgacagggcgatcatgatcagggcgatcccgatcaggacgggaggatacgtcaaggccgcgccgaacaatcccccggtgaaggccgcgatcaccccgagaatcgaatacgtgacggccatgcctaaaacgtacaggatcgcgtggaggaagacgccgccctttttcccctcggattggccgccgaaatagctgatcgtgatcgggatgatgggatagacgcagggagtcagggtcaggcccagcccgcccaggaagacaagggcgaaaatgaccgggagccctttcccttcaaacgggacttcccggccggaaggcccggccgcgggttcaagcgccggcggtccggattccggcttcgcttcaggagaaacagagtcggcggcttcggccgccggcggttcttccgctcggaccggagcctcggccgtcgacgccgcctgtttgtccgccggcggcgacggggacggagccgccgccggggggaaggccacgctgacggtatcggaaaacggaacgtcccagggcggaagacacgtctggtcgtcgcaggcctggtagctcaccgtaccggcgatcgtccattcctttccggcgaaatccgcggccaccgtgacgtcgaacggaacggtgatcacgccctcgaaaacggaaagcggcgtttcggagaagctgagtttcctcctgaccggccggggaaaggccggccagccgtatgtcaccccggcctgagaccggaaaacgatggtcgttccgatgaggtcctcgtccgcgggccggtcggagttgatgtgaaaaggaggccggatggtcaatttcagcgcggcttggacggtgcggccggcggtgaagcctccggccggagcgacgacttcgaccgagacgatatcgtccggggcttgactgaagacggccgggccgatcgccaataaaatgccaagaatgaaaaaaagacgcttcatgcgatatctctccgaaaacggcggaatcaggcggaattatagcacagccgttcggcggatgggggcgcgcccctccctcccttcgctgatttttgggacggagcgaggcggatccgcttgtccggctctccggagggatggtaccattccggagcgcggggaggccgtttcgcctccctgacgaatcgaaaaaggacgccgcatgccgcttgaccggaccgaagcgcttcgagccgagtaccgggcccgcatcaaccgggtcctcgactacatcgacctcaacatccgccgggacctccgcctcgacgagctcgcccggacggcccatttctcccgttttcattttcaccggattttcagcgccctgacgggagagacgctcaacgcttatatccagcggaggagggccgagctggcggccgcggccctcctccttcacccgaaagcgaccatcacggaaatcgccctggactacggctactcgggctcggacgttttcgcccgggcgttccgggagcgcttcgggatgagcgcctcggaatggcgggccggcggaggcgaggcctggcgcaagaaacgccaaacgaatggcaagaatcgtcaagcggaaggcaagataagccaagagattttcggcgccctggatgatgatgaggacgctctcatttcattcaggaggtccttcatggacaagtcgaaattcaaggtcgaggtcagggaggcgccggagatgacggtcgcctatgtccggcatgtcggtccgttccaaggaatgtcccaggcgttcgaaaagctgatgcgatgggccggtccgcgcggcctcctccgcttcccggagacaaaaacgctgggcatttatcatgacgatccggacatcaccgcaaacgacaagctccgctccgacgcctgcatcaccgtccctcccgggacgaacgtcgggggagaaatcggcgccatgaccgtccccggcggactgttcgccgtcgcccgggccgaggtctccccgaacgaattcggcgaggcctggaacgccttgatgcgcgactggctgccgggaagcgggtatgagccggacgaccggatgtgctacgagctttatctcaacgacccgaaaacccatcccgaggggaaattcatcatcgagatccacgagcccgtccgtccgttgtgacgctccgtcgccgtcaaccggcggcggggccgccggttgacggcggggcgattccatgattctcatccgccggaaaagccgcgaggcgaggtccgctggctctcggattccaccgacgaaaatcgggagataaagaacctgtttccgatttattggaatgaagtgaggcgacccggattgaagggaagctcaggcgaacgggaaaacgaggaagacggccaagtcccagagagtgtggctcacggcgcaaagaagcgccgagccggtccgcagatataaaaatccccagaaaactccgcagatcgcggccgcggaaatcagcatcggatttcccgagccggcatgaacggccgcataaagcaccgtcgcggcgagaaagccccggcccggcccaaaccaggccgcccagcgccgctggagaaatccacgccagaacagctcctcccccggaccgatgatgaggcccaggagaaagccgatcctgaacgtcgaagctccgtccttgaagccgtagacctcggaaatcccgccttcggcaaaggaaaaaaggacccgggagaccgcgtttccggcccaaaagacggcataaagaaaaaccgccgaaaccacgccccgaaggatcttgcggcccgattcgttccgaacatcggcccaaagcagggacgcaaaatcccggtcgagggccgcgccgagaacgacgagcaggaccaaggatccggccatcccctgccagaaatccaacgggccgaaacctttgaaaatgaaaagaggaacaaaaaagaggacggccgctccggccggggcaaaatcggccgccgcccttgctttccggcttcccatcgacgattcacccggaccgttcaagcgagccggccaagcggcgctccatttggggggatcatcccagcctacggccgagccataacccggccgtgtagagaaggccgaagtgaagattatagcgggccgtcgccccatccaagacaacgaagtccaagggatttttcggccggtgccggcgccgggcccgccgccagagggtcgcggcctcggggaggacggccagcgtgatcaggcacgggcaaggaagccggggcagaccgggaaggacgagcgggaagccggcgaaagcgatgaccaggagttgactcccgaacaagaggaatccatagtagacgatcgagccgcggtcgccgaggattccggcgcaggtccggatccggcggccggaatccgtggcgatgtcgcgccagttgttggcgtggagaatcccgctgacaagcatggcgatcggaacgctccaggcgaccggcagccaggaaaaccgcccggtctggacgacccaggcgcccagcgcccccaacacgccgaaattgagaaacacggccgcatccccgagagcccgggctttcaacaaggtgtacgccgctccgatgagaaccccggccgcgccgatcgccaaaaggatccagctcgtccgccatgccaagaccaggcccagggcgatgccggcggcgaacagggcgacggccccccgggcgacctggcgctcggtgagccagccgcggacgatcgctccgctgaccggcgtcgcttgggtatccactccgtgccggaagtcgaagacatcgctcagcatgttggccgccgcgtggagaatcaccatcgcggcgaacgccccgccgaacaggaggatgttcaaggacgccccgccggcgacgacggccaggctcgttccgaagatcaccggcatcgtcgaagcgggaaacgcccaaggccgggcggccgtcacccacctgcgcccaatcgaaggaggattttgatcgatcgtcatgggggcattatacccgaaaaacgccggcggatggccctggatccattcatcatcttgcccgagaggatcatgtcttgccattaaaaatcctgaccgaagccggatcgaatcatctcctttcacccccccggccgggattggatttcagacggcgcgattcgtattctggacctgaaaaaggcggcatgttatagtatccgctcatcttttcgacatccttcaaggaggacgccgatgcccgccaagcgctcatctttcgaccgccgcgaattcttgaaaaaaagcctgctcggagtcgccggagccggcgcttggagcgccgttcccggcgttctgaaagccggcgttcaagcatcctccgccccggccgcggccaagcccggcgtcatcacccgccctctcggaaaaacgggcgtcgcgcttccggtggtttcgatgggcgtgatgaactccaacaacgaaaacctgatccaggccgccctcgacgggggaatcgttcacctggacaccgcccacggctatcagcgcggaacgaacgaaggcgtgatcgggaaagtcctcaagggccgcccgcgcgagtcctatttcatcgcaaccaaggtccccggcgagccgcaggaccgccggacgggcaatttcttggccgaaacgacggccgggccgtttctcgagaaattcgaactcagcctccggcgcctcggggtggaatacgtcgacatcctctatctccataacgttctgacgaaggaggccgtcctgttcgagcctctgatgaacgccctcgtcaagatcaagcaaagcggcaaggcccgcttcatcggcgtctcaacccacggcaacgaacacgaagtgatccgggcggcgatcgagggcaagatccacgacgtcgtcctgacgtcctacaatttccggcagaccaaccgggtcgcgctcgacgcggccgtggccgatgccgcggccggcggaatcgggatcatcgccatgaagacccaggccggcgcgtactgggaccggggaaaaacccgtccgatcaacatgaaggccgccttgaaatgggccctgggcaatccccatatcaccacggcgattcccggcatgacgaccttcgaccagctcgccctcaacctccaggctatgaccgacatcgtcttgacggacgcggaaaaagccgacttggagctcggcggcgggggggagccggggctctattgccaaggatgccagacctgcctttcccaatgcgcccggcgcttaccgcttccttccttgatgcggggctacatgtacgcctacggctatcgcaacctcggagaagcctacgacctcgtcgcctccctcggcgtggatcggaatccctgcgccgactgcgcatcctgcccggttcagtgcgcgctggggatcgacgtgcgcggccgggcgacggacatcgcccggatccaggacgccccggccgatctgttcggctgagcgacggcgcggaacgaagaagcgccctccggcccgccgcggaatctttttttcgcctgatccggccgacggttcttcaaaaaacacggcgggagaacctccatcaaacggaatccggcttgacccggcgcgttttccgatcgatggcatagacgacgagacctgcggccgtcaacccgagtccggccagcgattctctcggccggtagatcaacccgtaggccaggatgtaaacgtggatgacgagaaaggcggccggcgtccaggggtatccccaggtccggtagggacgcggcaggtccggccgcttccgccgcatgagcatcacccccagcacggtcatgaatgtgaagagattcagggtgaatccgatgaaaacgatcacttggtcgaacgtcgaggtgacgatgtagaaaacagacaacagcccctggacgacgacggccgccgccgggatgtccttggccgtcgtcttccccaggaaccggaacaggcggtaatcctcgccgatgacccgggagatccgcggcccggcgatgatcatcgcgctgacgctcgaaagaagaaggaaggcgatgaccgcgcccatcaaccggccgccggccgcgccgaacacgcggccggcgaacacgtatccaacttccagctttcccgacagctcggcgatcgggacggtccggagaaagacgaaattcagaaggatatagaggacgctgacgatcagggtcccggcgatcaggctccgggggaggttccgccgcggattctcgatctcgccggcgacataagccgcggcgttccagccggaatagctgaacgtcacgaagaacatcgagacggcgaaggccgggctgagaacatcccggagcgcccggctcgtcggggcgaaggacaggccggccggctcgcccatcgccaggccgaggacgatgatcaggacaatgaaaaggatcttgaaaatcgtgatgacgttctgaaaccgggcgccaaggctcttgtccaggctgtggaggacggtcaggacggcgacgacgccgacggcgatcaacgaggaagaggacaagccggctcccgttttttgggggacggccaaggcgctcgtcaggtagcggcccagccccatcgccgcggcggccacgggggccgcgaatcccacgaggaacgaaatccagccggccagaaaacccaaggcgggatggaacatctccgtcagaaaatggtattcccctccgctccgcggaaaaaggacgcccgcctccgaatacgtcagcgccccgaacagagcgatcgccccccccaggatccagagaagcaggagggccgggcccgaggaaatcccggccgcctggaaaccaaggctggtgaagacgcccgagcccaccatattggccacgaccaaggcggtggccgtcgtcaagctgaacttcgtcttcatccttttctcatgaaataaagcagcaagcccttgtcgctcccccagtggtagcccaggcggaagggcagggatttcacccgcgcgggatcggcgaaagctttcttcaaatcgggctggccgacgttggcgaaatccttgaccggatcgctgtattcgccgtaaagacgggccgtccagcggccgagtttgaagtaccggaaggggattccggtgtcgtcctgaaggacgaaccggctccgttccaggatcagaacgcggatccgggagaaatcacggtaatgcatcaaataggacgcggatttaaggaaggtcgtctcaaaggccaccgtcccaaggtagaaagccagcggggaattctcgcggaacgccccgttggacaagtcgcaggaaatataagacagctctttcaggacgtcggctccctcagcgaaatacgcgagtcggacgccgaacggccggcggcgctttttcggctcgccgggaaaggggccttccaggattccgccctgatcggtgatgtccagccgggtgatcgaggcgatgacgttgccgctgcgtttcaggaagaagcataaaagcggcaggacgccgtcgaccttatcgccggccagctcgtcgttcatgttccgggtgatgaaatagcttttcttgaaaaaatcgtcgagcgaagcccggagatcctggatgtaccgggcggcggcgccgccttgatcggccgtaaagacgggcagccggccgacaaactccaagccgagcagaagatgccgggcggcctggggaaagagaatcacggccgtcaaggcatcggggccgccgaaaggataaaacagcgtcgtcgtggccgcggccgcctcgccgatctccgatcgggcccaatgccggaccggacccagccgtttcatttccagctccgcccaattcttttccagggcgtcggcgaactcccggtactccgcggtctcctggaattccttatagggagaggagacgcagggaaagccggccaggaaagaggcgagatcgtcgaagaccgggtcggcccggaggacggtttccgccggcgcggcggaaacggggggcccgtcgttccgccgggaagactcgacgtccgcgcccgccagagagaagacgccgagaagcgccgccccggcggccgcgatgaggacgatcctcgttttcatccgttttccccgcggatcgacaagctttccttcttcatcaacatccttggaagccgccttccatcaagccgaacggattcatcaacggccggcccggcggtccgcctccccgaagccgcgtggtttttaggaaacggccgtcctctcggctcgtgattcatccgtaaacaaggcgtaatcataaggaaatccgggggaaaaagcgaatcggggaaagcgggcgttcaggacgcccgctccgccggcctcttgatgattaagaccgtccggtcgtcgtcgggatcggccccgccggtgaattcgcgcaggtcggaaaagatcgctcccaggatttccccggccggccggccggccaagcggcggaccgcccggacgatccggcccgttccaaattcctcgccggccgggctgcggcattcggaaatgccgtcggtgtagagaacgaggatgtccccggcctccaagttcgcccggccttcctcgtaggtgctatcagggagcatgcccaaggccatgcccgtcccctccaaggaaagctcttttccgcccgctttcaaaagaagcggcggattgtgaccggcgttgacgtagcggaaatcgcccgtggatggatcgagctcgccgtagaaaaacgtgataaacacattgggggcggagctgcgatgaatgaaattgttgagcttgaaggcgagatcggccggacccattccgggccgggcttccgattggagggccgcccggagggacgccatgaggagcgaagcgctgacgcccttgccggcgacgtcggccacggtcgttcccagccgcctgtcggccagcgggatgaaatcgaaataatcgccgccgacgtggagtgacggcgtggattcggcgatgatctcgaaatcgccgcagaccgggcattccttcggcaggagtccccgctggatttccgcggccaagcgcagctcccgctccatccggtcccggatcaggccgtcctcgaccaggcgggcgttttcgatcttgaccgcggccagattggccatcagcgtcaacagccggaggtcctcgtcggtgaacgattcccggctcgaaacgcgctcggcgcagacgacgcccaaaatctccttctccgtctccaaggggacgcacatcgccgaatgcagccccatgtcgatgacgctctgacggtcggcgaaccgcgggtcctcggccgcgtcggtcgtcaggaccgaaagccgccgggaagaagccatttccacgaggccgcggctgatctgcatcggcccgcttttcaactggggattgccgatccggacggcccggggaacaagtttctccggatcgccctccttgaggaacaaggccccccggtccatggggaggtgggaggcgatcagatccatgacatattccaagagctcctgaaggggcttgtggaaaagaagagcccggctgacctcgttgatgacgagaagaagctggtcggcccgcgttcccggcccggagggctccatccgtctgacgccggcttccgtgctccgggtgatgatgtcccgggaaggaacggccgcgctgacccggacggcgggattgggcgaatcggtgatttcgacggccgccgtccacggccggtcgaaacaaatccggaccgccccgacggagatctcatcgcccggcgcgagaaggacgggttcgacgatgcggcggccgttgaccatcgtcccgttcttgctgcccgcatcctccaccgtccagcctcgcgatgtccgccggatccgggcatgacggctcgagatgtaggcgtccggaagacgaacatccgcgtccaaggcccggcccagaacggtttcttccttttcgaggagggcggagaacggcggggccgttttggggtagacataaagcgtggccatggattcctcctcatcccaatgttttcaggatccgccgggccgaccgggctttcacgtcggcgggcgcgtcctccagcaccggcaggaccgcgtccttcatctttttcgggaggacggcctcgagaagctccagggcataatccacggcccacttcgtgccctcggcataattctgaagggcccggcccacgtcctccggcggatacaggagtcccagaaggagaaagatctggcggtacccggcggcgggcgacgcccggatttccccttcgtccttcccgctcgtcccggccgcggccgcccggcaggcttcccggacgaagtgaaggatctcgggcttgatgtcgcgctcccggaaacggtggccggcccggcggtcccggaatttgaaaagagcttcgatgacggcctcggcgacgtccggatcccgacggcgcaattggcgaaccagcgcctcggccgcccgggatgtgccgatggaggccaaaacgccgggcacggatcggcggacgtgaagatcggcccggaagtccgccatccaatcccgaaggtcgggcacggctcgatcgccgtaagcttccagggtttccgccgcccggtcgcggacggcgggatggccgagatgggggacgatcaggggaagccagtcgcgcttcttcaagcgggccgcgctctccagggcgtaatggacgacgccgggggattcatgcttcagcaaccgcggcagataatcggtcagaggcgcgccggcgggcatcaggccgagaaccttggccagctccatctggtcgacttcgcgggcgggcgaggcggaggccgcgacttcgccgaacggccggcgcatgacgtcctgataggaatcaagggccaggacttcccgaacgatgacatcgagggcggccgggtcctccccttccgcccattccggtccgagcatctcgctgtccaagtccaagagcgtatccaaggcggacgcccggacggcggccgatttttccgaaagaatctgcctcagctcgggcgtcattcgttccgccttcaagaggtcgaacaggttgtaggcgtagaggacggagctccgctcccggctttccaaaaggtcgacaagcctcttggccgtgtccgcccgggcttgttcccggacgagccgctcggcgtcgggccgcgaagggacgaggttggcccggatcgccggcaggtagttgcggccgatccggacgaggatcaccagccaaagaccgatgatcccgattgtcacgaagctcatccgggccgcgtcgaacgccagaataacggcgaagacgacctggagaaggctggccagcgcctctccgcatttgctgacaaagatatcgatcgtcatcttggccttgaccttgacctcctcgggcagcggaagatacaggagctgcttggtcgcttgaaagaaggtatgggttaaggctttgtcggaccccttgaccaggaccgcccaggccgtgatgccggccgcgggaatgataaaaacggcggccgagccaagggccaggatcaggggcgtcacgaacagcgccgcccggactcccaaggcctggatcgcccgatgggcgaaaacggaattcaagatccacgagacgacgagcacgccgacggagaaagccgccaggaagtcggtccggcgcgcctcgagcggaaaagcgttcttgaccgcccaattgaactgaaaatcgatcatcgtcgaggcggccagggcgacgatgatcaagcccgaaagaaggcgaagataggggctggccgccagcgtccggaaaccatcgctataattgacggggcccgctccgagttcttcttcgcgtccgggcgcggaccggagcgccgcccggatgaaagtcatggcgatcaggtaaaagacaagcccgaggaggatcaggtggcgggccggcaggcggctggatagaagaacgaccaggacggagccggcgatcccgcccgccaagccgccgcccacgaaaaagccaaccagctgcttggcccgcctcggttcacagatcgacccgaccacgacccaaaactgagagacggaggccaggacgaagagttcgaaccagaaccagtaaagggcagggacaaggcgcccgccgagaccgaaaagcagccagaaggcgaccgtcccgacggcgaaaaaaagctggctccaggcgatatacgcccgccggtccagcgcccggatttttttcgtgttccaggcggcgaaaagacccgagaggacggccgagatgaaatacacgaggggaagcgacgtcttcgtcaagcccaggcccaagaaaagggacgtcttggaaaccttggagacgtagatggcggccatcaggaagaaaaaatgggcgcagaggaaaccggccaggcgctcttctcccggccggacgggggaaacacggttgaggaccgggcgcaagcggccgttcatcggcggggcctcccgggaatccaggtcagcttttcagaaagctctccagggctttctcctcgctgtccaggatgtcgaggacgcgcgtcaactgggtcacttgaaaaaccaggaagagacgcttggagatcccggtcaatttcaagcggccgccgctgttctgggtggatatataactggccaagatctcgccgatcccgaagctgtcgatgaacgggacgttcccgaaattcaggagaagatcgcgttttccggcttccagctgttccttgacgtgctgatgcacggaaacgccggccgtatccgaccggcggatttccccttccaggtccaagatgacgacgccgcctttttcgcgtttggtgatgaccatcggatcgcctcgtctttttcctttacattatcggaagcgggggatgatgtcaaacgccgccgccgccttttttcttgactccttatcccctcaggggcatagtagggaaagcggggagggctccatcgtgcctcgaaaattcattcgccgaggacgccggagggatcggtttttcgccgctttcgccttcctttgtctcctcgttcttcttccgccgggccggcctgcgaccgccgccgttccgccggtcccctgcgttttcaccggggtcgggaaaatcgtggccatcggggacctgcacggcgcctatgctccgttcgtccggatcctgacggacctgaacatcatcgacgaccgtctccattgggccgccggcaagacgcatgtcgtccagatgggcgatgtcatggaccgcgggcccgacgcccgaaggatcctcgacctcatccggcgcttggaggacgaagcccgcgaagccggcggcgccttccacatgctcctcggcaaccacgaggagatgaacatcctcgggctgtccttcgacatcaaaggatacgtcaccgccgagcagttccggtcgtttctccccgtctggagccgctaccggaagcagacggaagcgctgacgggtccggagaacatcccggcatgggaacgcttcatcgagggaaatttccaagcccggaacacttacagccggtactttaacgacaactacggacgctggctggcccggcgcccgatcgtcctcaagatcaacgacatcgtcttcgtccacggcggcctgaccgagcctctctccgccctgtcctgcgagctgatcaacgccgaaacggcccgtgaattcgaacggtatttcgcccgggagaaattcgagtgggtttggatgtaccggacggacgggccgttgtggtaccgcgacctggccatcaaggatgaagagacgatccgggaggaaacggaccggatcctggccaatctcggagcccgggcgatcgtcatcggccattcgccgacgaccgcggccctctccggatccgtcagccgcctcggaggaaaaatctgggtcatcgatacgggcctctggatcaacgacggtggacacgaagccgttttagtcatcaccggcgatcggatggagatggtccccgtccttcggccggccggagaggtgagacaatgagcacgcgaggaaggagtcttttgcttttcatcgggggcgccgttctctggctgttcgtcgccgcggcggtctcccaagaggagccgtcgatgaacaagatcgaggcgatcgaatcctacttggcgtcggcgcccgtcgtcgtcgtcgaaaaggacgtcgagccgggacggacgatgccctggcggttgacactcgacgatggacggatccggggacgggcccttttcaagtacatcgaccggcggacggccctgccgacccggcacagctatcgttacgagctggcggcctacgccctcagccgccttctcgaactggagatcatcccgcccgtggtcgagcgcgaaatcgaaggaacgcggggcagccttcaatggtacttggaaaactgccggagcctgcgggaccgggaacggctgagggaagagccgcccgtccggaccaattttcttgatgagctggccgacgtccaagtcttcgaattcctggccgccgacgaatgcggcgacaaggacgacaccctggttcatgtggacagctggaagatctgccgggtcgatttttccgaagcgtttcggcccgggacggagcttcccgcctcctgcgtttttcaccgctgctcccgctcccttttccaccgcctcgaatcgctgaccctggccgcgctcacctcccgccttggcgcttttcttcagccggacgaaatcgcggccctcttcatccggtcccggcgcgtcgccggaatcatccgcggcctgatccgggagcagggggaagcggccgttcttttcgaaaggaaatccccgaagagctgagctctccccatgaaggacgccgaggatccgtccgggacggcggctccggcggccgcccaagccgccgcccgggtcctccggatcctgacgttcgtccgcccggaggagctgaccaaagctctccttctgaccctgaacagttttctcatcattttcggctattaccagatcaaagccgtccgcgagggccttcttctcgccgcccattcggcctcggtcaagagctacctggccatcccccaagccgttctcctggttttcgtgatttggggattcgccaagctgtcctccaaagttccccgtcacctcctgatcacctgggtgaccctgttttgcatctcgaacttgttgatcttcgaccttctgaatctcgttggggttccggtctcgatcctcgggatcgctttcttcatctggatcgggatgtacaaccagatgattccggcccaattctggggtttcgccaacgacatctacgatgaggaacaagggaagcggatctttcccctgatcgccctcggggcctcgctcggcggagtcagcggcccgctcgtcgcccgcaagctcatccccgttttcggatcgtacgggatgatcctgacgacggccggaattttgggattcacaatcctcctctcctgggccatccaccgcctcgatctgcgggaggaccgggaggggaccggccggcccgcggaatccaaagcctcgccccttcttcccagcggcggattccgcttgattttcaaaagccgctatcttctgtacatcgccctgatgatcggcttgtacaatttcatcaacgccctcggcgaattcatgttctccgatctgcagcagaaaatggccctgcgggagctgggaacggcggccaccggcggcatcgccctccagaacgcgatcggcacggcgttcgccgggtaccagtctctgggcaacaccatcggcctgggaatccagcttgtcctcgtctcccgcatcttccgctgggtgggcgtggccggggcgctgctcttcctcccggtcatcgccctggggggatacggctacgccgccttcggcgcctcgctcgtcctcctcaagtggatcaaggccgtcgagaacgggacggattactccctgatgaaaacgacccgctcggccctgtttctcgttacccgccgggaagagaagtacaaagcccaagcagccattgagacgttcttcgtccgggccggcgacgccctctgcgccggagtcgtctgggcggggacggccgccctgtctttctcgatcgagggattcgccgcgatcaacgcggccggagtaagcctctggattcttctttgcgttctgatcgcccgggagcaccggcggaaaaaggccgccgttcgggagtagagccctcactctccggagatggacttgcgaaggaccaggacattctcggggccttcgcgccgatacatcattccatcggtgaggttgcggaccaggtgaatccccaacccgcctttttttctgccggagaggatttcgtccatggccggcggcggaaccgcctggggatcgaatgggattccatgatcccggatttccagccggatttcgtccggctggacccggatgtccaaacggatctcgccggccccgtcgggatacccgtagcggacgatgttgaccaggatttcaaaaagggccaggtcgaggcggaacaaatcgtctccggatatccggacgccccggagccggtctttgagaaagtcccgaagccggtcgatctcgctcatttcggccgaaacgctcagattcgccgacgcggcttcatcgctcatcctgtcctcgcccgggccgttccagcaagccctctcgtttattatgccataaacggcatccgcgcgtcagaagaggctctcgccggcgcggaaggatggtccatcgcgggaaggaaagccggctgatcagcaaaagggggtgatgatgatgagggaactctccccagccggcaaaggagaatctgtgtttattttaagtccggccggccggcaaatcaagcgacgaaagcaccgcctcgacggggatgtcgcgcacgtcggcggctgaaacctgcgtgatttttccgccgggccgccaggccccggcgaattcttcccgaaagaccgccgctcccggaacgccgaggacggccgccagatgggtcacgccggaatcgttgcccagatagagcgaagcttcggaaaggagagcggcgagctccggcacggccggccggtcgagaagaagccatcccggggggaggacgccggcggtccattggaccttcaagaacgactcggcctcgcccaggaccacggccccggaaagtcccgaggccgccagcgacccgacggcctgccggaaacgaccgcccggccagcgcttgaggcggcttcccgctcccgggtgaacgacggcgtaaggccggcggggagccgaaatccgttccggactccgcggccggggaaggaaggcgcaggattcaaaaggcgcggagggaagtcccaaattcctcagacccgccgccgtcccctcaaaaaacgaaacggagagcggacggccggtgcccggatcggcggaaacagtcaaaatccctgctcccggccatagtcctgccgcgctccgctcgaaaaccgccgccgacggcgaatgaaaccagccggcggccaaatcgatttccgccggatccggcttgaagcgctccgagaggccgtccgctccggccagagccgcccagcggaaatcatccgcgtcggcgaccgcgtccacgatcccggaatcaagaaacaaacgcccgaagatcggccgggcgacaagcgtgatccgggcttcgggcagcgtcatcctcagaaggcggacggccggcaagacgaccaggagatcgcccaagcctccccggcggagagccatcaacgatgtcatcggaaggcgtctccggggcggacaggcctctcccgtccgcggaatcgaagggggagaatgccggctgtgtttaacagcagaaaagggaaaatattggtattaggaaggataaaagttttctccagccggcacaagaaaacattggttgtattatagggaaagaaaaagaaaaaatcaagcctgattttccgtcgatctcggaatcccgtttttctcgatgtgatgcttgatcgttttgccccggaccatatagatgacatcctcggcgatgttggtggcgtggtcggcgatccgttccaggttccggctgacgaggatcaaggccaccgcccgcctgatattgtggggatcctccatcatgaaggtcaggagctcccggaaaatctgatcgtccagggcgtcgacttcgtcgtcccggaggcagacgtcccggcccagggcgtcgtcccggttgatgaacgcttcgatcgcgtctcggaccatcgcctgggccaagagggacatccgggggatgtcgatcaagggcttgaggagggggagacgggcgagatccagggccagttcggcgacgttgacggccaggtctcccatccgctccaggtcgcttccgattttcattccggcggtgatgaaccgcagatccccggccatgggctggcggagggccagaagccgcatgcagatctcatccacctcgacgtcgaggacattgatgttttcctcgtttttcagaacggcccgggccggctcttccttctgctccttgagagcgtcgatggccaaggacagggcgtcctcaaccaaggcggccatccgcagaatcttctccttgaggaattgcagctcctcgtcaaacacgcgttccataagtccctccgcggccattttcggacattccgggccgcttggcaagagtcaggatgccccgcgttcatgaagcggcgatgtgcatcccgtgaatttttcgggaaggaagacggtctgaggagggggccgggcggttttcttgacaggatccccccccctttttataatgaatttcactatcccgtaattatttccaaaggagaagtctgtggagaggaaggaggcgcaggttccggtctggaagacgctcgcggccttcctggccgcgggcgcgcttgtcctttccgctgttttttgcggcgggaagaaaaccggctcaggcggagcggccgccctccaaatcaaaggctcggacaccatggtcaacctcggccaagcttgggccgaggctttcaacacgctccatcccgaaatcaacgtggccgtcaccggaggcggctcggggacgggcatcgccgccatcctgaacggcacctgcgacatcgccgagtcgtcccgggatctcgaggagaaggaaatccagcaggccgaaacggccggcatggtcgttcatgaaacgatcgtcgccctcgacggaatcgtcgtggtcgttcatccctcgaatcccgtctccgccctgacgatggaccagctccgcgagattttcatgggtaacgtcaagcgctggagcgcgttcggaggcgagaaccggccgatcgtcctcctctcccgggaggtcaactccggaacccacattttcttcaaggagcacgtcctccgccggggaaaaagcaagggaccggaggaattcgccccggcggccctgatgatgccttcgtcttacgccatcgccgaggaaacggccagaaacgaaaacgcgatcggatattacggcctcggctatatcagtccgcggcaaaaggtcctctccgtgtcccgggatgaccgctccccggccgtctcgccgacgatcgagaccgtccgatccggcgcctacccgatctcccggccgctttactttttcacccggggcggaccgtccgggacggtcaaggacatcctcgatttcgtcttgtcgccggaaggccaggaaatcgtccgggcgaccgattttgtgcccgtccgatgaagctctccccgcgccggctccgcgagttcgtgatcgagcgtctcatctttctcagcgggatcgcctcgatcgtcttcgttcttctgattttcgtcttcctgctccgggaaggcgtttccgtcctgaaaacggcgtcgccgggcgaatttctcggcgggcatctttggtatcccatctccgctccgccccggctcggcatcctgcccttgatcctcggatcgctgctcgtcacagccggggcggttgtgatcgccgtccccctcggcatcgccgctgcgttctacatcgccgaggtcgctcccaagcgcctccgggcgatactcaagtccttcgtcgaagtcctttcggccatcccctccgtcgtcctcggcttcatcggcatcaccgtcctcgttcctttcctgaagagcctcctcaacctgccgaccgggttaaccgctttctccggatccctgatgctcgctttcatggccctgccgacgatcatcaccatctccgaggacgcgatcaacgccgtcccccgcgagtaccgggacggagccttggccctcggggcgacccattggcagacgctccaccgggtcatcatccacggggccctcccgggcatcatcgccgcggccatgctcggcatcggccgggtcttcggcgagacgatggccgtgatgatggtcaccgggaacgcggccgtcatcccccattccctcttcgagcccgtccggacgctgaccgcgacgatcgccgccgagatgggcgaggcggccaagggcagtcctcactacttcgccctgttcgccgtcggcatcgtcctgttcatcatctccttcgccatcaacctgaccgccgatcttctcctcaaccggggccggaagaaatgagacgcgagctccgcggccagaaaatcggcttcggcgtcttgctgttggccaccctgcttgtcgtcatccccgtcgccgccatcgtcgccctggtcatcgccaagggatggggagcgctgtcctgggaattcttgttctcgatgccccgggacgggatgcgggccggggggatctttccggcgatcatcggaaccgtctacctcgtgttcatctccctggccttcgccctgccgatcggggtgatggccgccatctacctcaccgaatacgccaaggacaatcttctgacccggatcatcaacctggcgatcatcaacctggctggagtgtcttcggttgttttcggccttttcggcttgagcctgttcgtcgttttcctgaagttcggcgtttccatcatctccggagctctgaccctcgggatcatggccctgcccgtcatcatcaccacgacccgggaggccctccggtcggtcccggacgcttatcgcgaggtcagcttctccctgggcgcctcgcgatggcagaccgtccggcacgcggttctccctcgggccctgtccggcatcttgaccggggcgatcctcagcgtcggccgggtcgccggggagacggcccctatcctcttcaccgtggccgccttctacctgcccaacctcccgacgggcctgtccgaccaggcgatggctttgccctaccatctctacgtcatcaccacccagatcccgggcattcccgaaagcttccgctacggcacggccctcgtcctgatcgggattgtcctgatcatgaacgtcatcgcgaccgtcgtccggtcgagagcctcgaggaagaaatgagcgcccccgccgggacggtcaaagtttccgttcgcggcctctcggtctcctacggagccgccgccgccctgaaaggcttggacctggacatcgcctccggcgaaatcctcagcatcatcggtccttccaactccggcaagacctccttcctccgcagcttgaacaggatgaacgaattgaatccccgcgcccggacggccgggaccgttctcctggacggagcggacgtcgtccgggacatgtcggccgaggccgtgcggaagcgcatcgggatgatcttcgccatgcccgtccccttgccgctctccattcgggataacatcacctacggaccccggatggccggcgtccgggacgccgcgatgctcgacggcctgatcgaggaaagcctccgggccgcttatctttgggaggaggtcaaggaccggctgaacatgcccggccagaagctctccggcggacagcagcagcggctgtgcatcgcccgaaccctggccctcaagcccgacgtgatcctctacgacgagccatgctccggcttggatccgatctccacggccaaggtcgaggagtcgatgctcagtctccgccaaagccacacgctcgtcctggtgacgaacaacacgaaacaagccgcccgcgtcgggacgcggacggcgtttttcttgatgggtgaaatgatcgaggtcggcccgaccagccgcctcttcaccgcgccggcggacaagcggaccgaggattatatcatcggaaggttcgggtgaggccgtgaaaaaggcgatcgatccccggcctctcccgcctgtcctcgaggtccgcggccttaacctctggtacggggatttccaagccctgtcgaacgtttccgtctctttcaagccgcgggcgatcacggccttgatcggctcctccggctgcgggaagtccacccttctgcgcagcctcaaccggatgaacgacctggtcgagggcgcccggatcgaaggggaaatcctgttcaacgggaaggacatccgccggaaggactgctccctgaccgtcctgcggaaaaaggtcgggatggtcttccagcggcccaatcccttccccttgagcgtcttcgagaatatcgccttcggcccccgggtgcaccgcctggccgccggcggcgatctggatcgaagggttgaagagagcctccgggcggtcaacctctgggacgagctcaaggaccggctcaagaaaaacgccctgtccctctcgctcgaacagaagcagcggttgtgcatcgcccgcctcgtcgcggtcgaagccgaggtcctcctcatggacgagccttgctcgaccctcgacccgatggccacggcgaaagtcgaggagctgatgcgccggctcaaggagcgctacacgatcgtcatcgtaacccacaacatgcagcaggccgcccgggtctccgacgagacgggcttcatgcttctgggcgagctggtggagttcggccggacggcggagattttcacccggccgtccgacaagcggaccgaggattacatcaccggccgcttcggttgaagatgcgcgccccgccgattattccttcccggcatccgccggagcggatttggccctgtaccgggccggatcgtcgaaaacgtcgaggacgaacacccgggtgaggaaggcggccgagtggacggcgcctccgggaatgaaataccggtctccttttcgatacgtcttggtctcctccccgatggtcaggatcatttcaccctcgatcatcaagccccattgggcgcagtgggcatgcggcgggaccttggagccggcggcgatgtcgaagaaaaccgcttgggtcagctccccctggatcaggcggccgcggatcccggcgaggggagtctcgatctccggcaatcccataatcatttccggatagatgcccggcatccccgcctcctccggatcgctttcgggcggcgatccgcttgttatttctcgagctcggccagccaagcggccgcgaactcccgggccgcctgggtcgcttcctttcccgcccggaagcagatcttccaatcggagggcttgtcttcataagcttcgtcggcaaaatacatcctcgacttcctcttgactaacttggccgagaaatccaccccggcgctcgtatctaggaattcccggattcttctcttgatcagaccgcggacgtccgccgggtattcctcctcccaagacttgagctgctcggcgtattgctcggcgttttccccgctctccatctccttgccctggcgcatcagggccatctgcccggggtccttttccatctcctccatccgggcccgcatttgcttgatgccctcctccaccgcctttctcgtttccgcatcgaggccggccaggttttcctgcatctcggcgacctgcttttcaaaattggccttctgctgtttcagcgattcatcggccgagatgaccttgtcgggagggcccggcttctgctcgctccggaaatcggcgtaggcggctttaaaggcgggcgactcggaatacgtcttgatccaggcgagccccccgcggacggcctcggcccgggcggagggaggaagggccttgaaggcggcgaaagccttctgatcgtaaggagagccggtcaacaatccttcgaggattccttccttggcggccgcttcgctcaggcggagcgtggacagaatgtccgctcccgcggccgcgaccccgaggacgacggccgttcccaacaggaaagccgcggcaaggccgaagcggcgatggtgttctatttttaaattcatgcgattcctccgtcggtgggatggtttggatcgacaccataaagcgccaaggggggaaagtcaaggacgcgccgccgcggccggtggactccccgcgttttctgatatactgatatccttgaaaaggagacccgcatgcacggaaaacgaatctttttcgccctggccgccgtcgccttgatcctgggaacggccgcggccctcgccgccccgcagtcccagcggcccccggaataccgggaaatcatggccgcccagaatatttcggaccttgccgcccgcttgaaagagctcgagcgcatcaaggccgcctatccccagagcccgctgaggccgatgctcgaggaagcgatcctcgtcaccaaagtcaaaatgtgcgccgccctggacgaagtcctggcccttcaaaaaacggtcgtggggcagggcgagggattcgaccggatctactcgtacttcgccgcggccatggatatcctccaccatcccaacctggcccgcttcgacgcggccggcgtcgttcaggccgtcgtttcctaccgggacggagcggaccggctcctcaaggaggaggcctttatccgctcggtgccggaggaggagcgtccctatttattcgaatacggcaacaacatcaatgtcgtcgccgccttggcctgcgtcaacgccggtgaaccgagccgggccctcgatttcttgaaggtttaccggtcggccggcggcgcggaagacgacgcttattcctatgcgtccgccgaagcctcggtgaagctcggaaagaacgaggacgccctgggcggttatttggccgcggccgtcgaaaactaccgcgacgccgaggcgaaagcccgggatctgtgggcgacggtcaagggaacaccggagggattcgaggccgcgttggaaacccgacaaagggcattgcccttccatccggaagcgttcgccgttcccgctgattggaaaggcaagacggtcctggccgagatcttcaccggttcagaatgcccgccctgcgccggagccgacctcgggttcgacggactcatcgaatccgtccccgagacgcacctggcgattctggaatatcatcttccgattccccgccctgacccgatgatcaatccggcgacccgggcccgccagcagtattacggggtcaacagcacgccgtccacgttctttgacggcgcgcggaaggcgtccggcggcggcggccgggccggcgcggagggaaagtacaaggaatatctggccgagatcaaatcccttttgaaggaagagccggcggtctcctttacggtcaaggccgtccgcgacggcgacgaagtcgcggtcgacgtgaacgccgaaaaaaacgcggccggggccgagacgttcgccgccctcgtcgaaaaggaagtccggttcaaggggggcaacggcatcgttttccataaaatggtcgtccgggatttccaggcggtctccccggaaaatccccgggtggtcttcgacctggccgcttccgagcagacgacggacgcctatctcacggaatttgagaaaacctacgaccggatccccaattacaagttcgccgaccgccggaaccgtatcggccgggaagggctccgggtcatcgttttcgcccaagacaagcaaacgaagaaggtgttgaacgctgcggccgccgacgtgaaatagggggttcgaaacgggacgttcatgcctcccgaatacgcgcccaagacgatccgctttatggaggcggcgtacgccgcccagggcgtccttcggcccctccgccggcagcgctatgagccgggaacggtcttagaatacgaactccgcggcgtttggccggccgcccgggcccgcgtttccttggaaatcctcaagttcgccgggggcggcttcgccggccaggtctaccaggtcgcggcgcggtcgatcgtcccggtcgaggaccaagtggaagggctggaagccgggcggacctacgccctgaaaatcctgattcctccgtcgcgcttcgccgcccgcgtccggaactttttctacggcttcggctttcaggccccgttttcgctccagtcgctggccgcggccggccgctcccaagccctctggcagaaattcatccgccgggccgcccgggtggagttcggccgcgacgacgctgtggccgacgtcatcggcaccttccgcgacgagaggctcggcagctacggcgagctcggcgaatgggtggacggccgaatgtggcggtttgaaatcgatgacgacctcgattcccggcgccgttggaagcccggcgatccggaggacgggatcgggtccccggaataccggacgaagcgtgaattcatgaaacggctgacggcgatgatgcggcggatgggagcggaggagctggcccgccagtacgaatggggatcgttgaaaagccagcccaatgccatgaaaaggatcgcctccgatcccgacccgagggccgggctgaccgccgtcgatttccgggcggggatggccttgacgcccctcaacccgcagtgccccgtcgatttcaagctcattctccgggggctcgggcggggccggctcgtccaattcgacaagggcgatcttcggaagctcgagcgtttcgccggagaacacgccggcgacttcgccgatcttcggccggccctggaggaactgaagcgggaagacgcggcctaccgcgattcccttgtcgattggacgcatcatcatgtccggctgttttccggccgcctccgccggcggatcatggccggattccgcgagagctggcgggtccggaacatcaccgacgaccggacggcctccgtcttggcgaaaagcggagtcctctcccttcttttcctcggagcgccgggactggccctggcttcgccgctcttgtttgttttcgcctggccggggcggatttggtggaagtatccgctctggcttcttccgctcattctgactccgctcgtccgaaaaatctggggccgggacgattttcgccgccattgcggccggatgctcacgagtccccgctacatcctgcgggcggggcgggcccggatcgccgaggcgatgatccgctgggtccggacgggccgggcctccgaggagcgcgcccagaacatctcctccgctccctggcggtattacgctcagctgccgttttccctcttgccgcccggcttccaccgttttttgaccgagaaggcttacttcaaggaacggatccgggccctttttatccagcccgcgcggcttctcgtccggccggccgagcgggagcgctggatgatcgggatgatcgaccagggcgggaaaaacggccttctgacggctcccgaggttgagcgcatcaaggcccaggtcaaggagccgtacatccagaaatatctcaagagcctggccgtccatgccgccaccctgttcgtctcggaaaccgtctttctcgtagcggcagtcgtctacgtcctggcccatccggaattgacctggcaggcggcgacgctccgcgccgggctcatcatcggcgccttgaacctcctgccggtttcgccgggatccttggtccggggattctacgtcgtcggcctgatgatcaaggagcggaacttcaaggactacaacatcgccctcggggtcagttttctcaaggtcttcggctacttggcgttcccgatccagatgacataccggtatcccgacctggcccggttcatggccggccattgggccaacgaggccgtccaccgggttccggtgttcggcgagaaaggcgcctggctggagcatttcgtttttgacgcgttctacaatttcccgctgaccctgcgccggaggatcaggacgcgggcggaaaggcgggccggggagccgaaaaaatcctggacgacgccgctcctcgccctggctgcggccgtcgtcctgggcggcctgggggccggcttcgcggccgtcgccgggggggcgccgtcgttcaaccggacctggggcttggcggtctgggtgccggtgctggccggggcggcgatcgcccgggcggcctccggctttcaaatcggggcgcgcgtccttcggggaatgaccggcggcgcgcttctcggggcgttcgccggcctcgcctcccatatcgcggccctcgccccgtttttcggcgcggccgccgccgcggaaaacgttcccccggtcttggccgcggccaagtcgggagtcacactgatgctgctgttcggcgtccttggtctcggaggcgcgctcttcgccgaaacgcgccgtccttgaaccgggcggatcagaaccggtattcgagcccgaagaccgggaggatcggcgcctgcgggacgatgtcctgcctgttttcgacccggttccagtaatagcgggcgatgttttcccggtccaggagattgacgacgctgaggtaggccaagagaacggatgtccggaaccggaactcccggtccgcccgcaggctcaccgagctgtaatccgggtaacgggtcgaatcgagccgggtgacgtcgaggacggcggcgttcagggccgtcgaccgggcgatgtcataaggcgtgtacggaacgccgccggccagatcccagcgcaggccgagattccatttccgggcgatccggacgcctccgatcatggtcagaacataccggttgtcgttcaaccggtcgcgccagcggcccagggcgtcgcggaaccgggaccggaacaggctcgctccggcgaagagatgccacgttccgccgggcttcttttccgccgtgatttccaaaccccgggcggcggcttgaccgtcgtcggtcaccgtcgtgaacgaacggtacacgccgtaatcaaggcagaggtcgaagacggaaaattccgggtcctcgggagtcaccggcagacggcggtactgcttgtcgtagacatccagggtccagcggaagtccttcgagacgtcgtgggagacgccgaaaaggaaatgggcggccgccggattgcggttgtcgcggacggccggcgtgattccaaggatggccgtcggaaccgcttggcggaagatcccggccgcggccttgagggtcaggcgtggactgaccgcccaggcagccgaaagccgaggggaaacctcggccgtccggttgtgggaaaggacgtcgagccgggctcccagggatacggtcaacgggggggccggccgccagtccaggccggcgaaaaccgcgcccttggcgaccgtcaagtccccccgggccaggaccgggggaatgagcgaggcgtacggatcgacgtaggcgccgtaatagttgttgaaatcgtaaatctcggccttggcctcgaatccgagcgaagcccggagccgcccggagagaacgagccctccgacgtggcggaggccgatgatgtccgtcgtttcgtcgaagagaaaggccgccgaatcggtgaccgagtccaagagctcgtcggcgttgcggtagcgcgaccaggagagggtcgtcaccgtggagtaggaatcgctccagccggcgtaccagcacagcccggccgtgttctggcggtttttatagttgagcgcccgggtgaagcccatggccaccgcttcctcggcgtcataggacaagcggctgtcggcgttcacatcgagcagctcgagccggtggcgggggccgaggtcgagcacggccttgaagtggacgtcgccgaagcgcggggcgacgccgtagccgatgattttcgtgacgaggtcgtgatagctccgtttcgccgagactaggaacgagccccggccgccgaggatcggcccctccactccgccgccgaaaccggcggtgttgatgtccacttgagcctggacgcgttcgcggtcgccctctcggaagaccatctcgataaccgaggacatccggtcgccgtaggccgcgtgaaacccgcccttgaagaaattgagcgaccggacccaggaggcgttaatcacgccgatcaggcctccgctgccgccctgcacctggaaatggttgatgtcgtaaaacggaatctgatcgacgtagaaggcgttttcccaggggctgccgccgcggacgatcagctcgttgctggtgtcgttgacttgggagatgccggccgtggccttgaggacgcggctgacgtcgtcgaccgaaccgggcgtttggcggaggcgctctccttcgaccgacacggcccccgccgtccgctcgatacggctcggcccggcctcggccgtcaccgttacctcctcgcggagcgggccgggaaggcggaccatctccacgtccaggcggaccggaaccgccggatccacccggagtccctccacggcccggggggcgtagccgctccgatcgaagagacaggaatagacgccagccggaaggccgcggaactcgaacgctccgcccttgccggtgaccgcggagcgttcagtccggccgggaccttcgcccgccggaaggatcactcgaacgtccgcgagtccgcgccgcgactcgtaatcgaggacgaaaccggaaaggacgccggccgattcctccgaggatgcggccggcgggccgaaggcggaaaaaaaggagacggccaaaaaaacgacgatccgcgaacgaatccttttcatttccgatccgcgagccggcctcgcggaaaaattataatgaaatcccgccgcctccgccagggatgttccgcacgttccctcgtccgtttagccccggcctttcgcggccgcgaatcaaggggagaagcgtgatcagtctgagccatcggagccgggacgcccggcatgacgcgcccgatgccgccctcctcccggggaggcggatgcacggaggcgatggccggacataaagaacgggaaagacgacagggacggcctccgccgcggctttcatgccgcgttcaacgcatcccgggaaagaatggcgacgtcggagatcgggacgatcatgacgatcaaagtgagaacggtaaaaggggcttccggaggcgggccttcgctccaccggaccaaacaggccgcgccgaaaaagaggataggggatgggacgaggcgatcgaacgtcaacgacgcattctccgcttgaggcgcatgatccgttcataggaacggtcgaagcgggcttccgggatcaccccggcggccgcggcccccttgaggatgccggcggcggccgcggcgatctccggatcgaagaccgaattgttggcgaagatcaggatgtcgaggccggcgtccacggcccggatgaccgcttccttcaagccgaagttcgccgaaaccgccttcatttgcatgtcgtcggaaacggcgaggccgtcgtagcccatcccctctcggagcaagccctggatcgccggccgggaaagcgtcgccggatatcgcggatcgatttcggcgttgaaaacatgggccgtcatgaccgcgtcgcaaagcccttctccgatgatttccgcgtagggctccagctcccttttcgaccaggtgccggtgacgtccgtgaaccccaggtgggaatcgtttttcgagctgccgtggccggggaaatgcttcaaggtcgtgaggacgccggcgcgatgatacgcctggatgacctcgcgggcatgcctgacgacgacggccggatcggccgaaaagctccgctcgaggccgccgatcacgggattttccggattgacgtcgagatcgacgaccggagcgaagttgaggttgaatccggcctcggccaggacggccgcctccgcctcggcgcaggcgcgggtgacagccgcgtcatccaggccgccgagatgtttttgggaaaccgtcgccgggaagccgtacttttccttgagccgcgagacccggccgccttcctggtcgacggcgatgaaaagcggcgtcgccgccgtttcctgcagggaagcgatcagggccccgacctgttcgggggaggcgatgttacggacgggattttgggacggaacatcatagtcgaaaagaacgaccccgccgattttccggtcgcggatgtcggcgatgacgggattatccgcctcgagggtcagcccgcgaaaaccgaccatgatcatctggccgatcttctcgtccaagccggcgggcgcggtcccgggccgggcggcgaacccggttttgccgagcatcggcaggccggcgaaggccgccagcccgcccgccagaaactccctccggctcatgaagcgccgcgcatcctctttggtcattatgcgatgatcctcggcaaagacgttcggccggtcctggaaagaccggtcactttatcttcaatcccaaatcggagagctggcgctcgtcgacggccgagggcgagcctgtcatcaggtccagggcgctggtcgtcttcgggaaaggaatgacctcgcggatggactcctcgcccgccaggagcatcaccagccgatcgaagccgaaggcgatcccgccgtggggcggagcgccgaagctcagggcttcgaggaaataaccgaatttctcctcggtctcggcttcggaaagacccagaaccttgaagatccggcgctggaggtccctgtcgtggatccggacggagcccccgccgacctccacgccgttgaggacgaggtcgtaggcctgggcccggacccgggccgggtcggtttcgagaagcggcaggtccccggccgccggcgcggtgaacgggtggtgcatcgagacgtgccgctgttcctcctcgctccattcaaacagggggaaatccgtcacccagacgaaccggagcatttccttccgggccgattcatcgcccggccaagtccgccggatctccccgagggccttcagggcggcgagcctcgcatcggcgataaacagggccaggtcgttttccgctccgccgagggacgcccagactttatcgaaatcagcctcggacagcttgagggacgatttccagccgttctgtttcttgatccagaacgggcccttggccccgagcgccttggctttctcacccagcttgtccagctggccgcgcgacatcgaggcggccccggggacgagcaggcctttaagctccgcgccggcggccagggccccgcggatgacatcggaagcgatgtcgcgggccgccgccgtcaggtccctcatctcgagcggcacgcggaggtcgggcttgtccgagccgtatttctccatcgcctcggcataggtcagccgggcgaaggggcggccgatcgtccgtccggagagagcgaagatcgcttccatcaagccctcgttgagctcgaaaaactcctcccgctcggggaagctcatctcgatgtcgatttgagtgaattcgggctggcggtcggcccggagatcctcgtcccggaagcagcggacgatctggaaatatcggtcgaatccggcgatcatcagggtttgcttgaactgctggggcgactggggcagggcatagaaccggcccttggatatgcggctggggacgaggtaatcgcgggcgccctcgggcgtcggattggccaggatcggcgtctcgatctcgagaaagccgttccggttcaaataattgcggacggccagggcggcatcgtgccggagacggatctggcgctgcatcttcggccggcgcaggtcgagataccggtatttgaaccgcagctcctcggaggcctggggcgggtcgacgatcgcgaagggcgggagcttggagggggcgaagacccggagagcggacgcttcgacctcgacctctcccgtcggcaggtccgggttgacggccgagcggcggcggacgcggccgcgcaccccgacgaccgattcgttccggagccgcttggcttcttccatcagctccggccggtcggtttggaaaacggcctgggccaggccctcgcggtcgcggatgtcgacgaagatcaaatgtcccatgtccctggtcttctgaacccagccgcagaggacgacctcgcttccttcgtgggcgggccgcaaggccccggcataatgggtccgtttccaggacgcgtgttccgtttcttcgctcatcgggatttcgccttatcggaggtattccgccgctattctagaagattttcaacatgttgtccaaaccggggaaagcggactccgcccctcccccggcaaaacaaaaccaggccggcgcctaccggcccggcggcctcaagacccggaggaacgaagcggaaaacagcttcgtcatctccgccggctcgagtttttccccgagcaatccggcgatgacgccgagcatttgctcccggccggctttcccccagagacacctctcggaaacgatcgaaatatattccgccccgatccgccggctcgccgcctggactctcgccgcataggaagcggcgagttcctccttgcccagaaccaggccgatcgtcgatcccgttttcttggccaggtcgaggaccgcgtcgccggggacggcgccggtccgcaaaaagaccggcttcttgatgttttccagcaaggcgacggattgagaggcatccaggccgtcggcgatcagcaggagactcgtcttttccagggcctcgagaatctttttcccctcctcgctcaatcccccgccgccgaaaagaacgccgggatcgtcgaggacgatgaaggcgaagccctgcttggccaacgcttccgtccagcgaagatcgtcgcggatggcggccagtccccgcaggccggggactacggtcgttttccacggccggcggcgctccgacgccccttcgttcccgaagaggacgagccctttcgaccgggcgatcgcctccttgccgtcgagaagtttccgcagcaaatccatcctcaaggcatcgccggtcaagccgtcgttcccggaaacaacggccagttggaagtcaacgtcctgatccagcgaatcctggtgctccccgatcactttctccaggggcggggtctcgtgattgaagatcgtctgatagcgccaatggaacatttcccggcgcccggcgaggatcgggacgtcccgctcgcaggacaggatttcgagagcggccatgacgaacaaaccggcgttccgcatgatgtccggcttgatgtgggcgatgacgtcgccgacgcggttcgtcttgaaatgagggccgtccgtgtcgagatagaacgccggcacgccattgtaaaggaaataggtatgatccgagccgcccgggccgccccgggtgaaaatcatgttgtcccggatctcttggggaaggcgggctttcaggatctcatagatctccggggcgtaataagcgccggacgcctcgaccttcccggttccgtggcccaccatatccaggttgatattggccacggtttgatccagggggaaaacgggattttcggagtaatgcttcgagccgaaaaggccctcttcctccgctccccaaagagcgaagaggatcgtccgcttgggcttgaagcggttgagcttcatcacccgggcggcttccatgaccacggccgtccccgacgcgttgtcatcggcgccgttgaggatgtcgccggtcatgtccacgccgagatgatccatgtgggcgccgatgacgacgatttcgttcttgagcttcggatccgtcccggagatcttcgccaggacgttctgggtcggcgccttttcattgaaatcaacctggatgttgatcagggactggaccgccaggtcgtacgattgcggctttccggtttcttcaatctgccgaaaaaagtggcgggggtcgcccctctgccatttgaaaatgaaatccacgatcttgcgttccacggaaaggatgacgaatccgggatcatagatttctttgtccaggccgccccggaagtagttcccgagaggctgagtatcgctccggaaaagcagcacgccccgcgccccgcggcttcgggcggccttgatacggttctccagcttcgcttcttcccggagagcgtcgcgcagccggacgggggtatccgtcgaaaagaggacgagcttgtccttgacgtcgacggccgcgtattcgtcgaaatccttgtccggcgcggaaatcccgtatccggcgaaaacgacgtccgccccgaacaggcccgatccagagtagcgggattggatccaatcttctccgtagacgaagtcgcgcgtccggttgtgggcgacgatcccgagggacgcgccccgttggacatcataagactcgaacgtaaaatcctggaaatagccgttgttcggtccggccggctcgagtccccaggacttgagcttggcggcgatgtattcggccgcgcggagtccgctcggctcgccgcttttccggccgagcatcgtgtcggcggcgagatccttcaagtagccgaaggccgcttgatgatcaaactcgatttttttattctggggcgatgccggaaagacggaaagaaaaacgctcaaggccaggacgatcgcggatcgcttgaacatgatcacctctcggtcgattcgttccgcttaaaatactccattcatcggcccatggcaaaccaacgccggggatccgtgatcgtaaataaccgccgccccctccaaaccgatggacgcgtccaccttccgcgagacggcggaaaggatttcgtttcccggcttcctgttccgattcttcgctcatcgggatttcgctccggggaagattttccgcctccgttcatgaggatttccggcggattgtccaaaaaccgggcggttcctgaactagttcagtcccttgacgctttcccgccgccgggcctatgataagaaatcaaagagcgcggccgattcctaataccggcggacccgctcaagccgcatttccacaaggaggatttcaatgcgcggattcaccctcgttctgaccggatgcctttttcttgccggcctcgccgttccccccgtcccggcggcggacgacgcgcttcctcggcttgtcgggatctggaaagggatcgaacgggacatgcactgggaggaatcgggcttcacaatgaacgatgaatcgcccgtcaaagccgtttttgaaatcaaggaacagaaaggccgcgtcttcacgggcgtccggacttggaccaaccgccaggggacgttttccgagcccttctccggcgtgatcgccgcggacacgaagcggctgtatatggtcgaccatgaggacgggtaccttttcgccgacatcgccggcgcgaatgaaatccacttttattacctggaaagcggcgcctcggcgaaaatcatctataccaaaaccgtgcgcgacgaataatccccggcggctgaggcggccgcggaggcctagagcagcgtttggatcagggcgtcgggcgttccggatgtctgcgatccggtggccatgtccttgagcaggaactcgccccgggccagctcgtcctcgccgatgattaaaacccaggaggcgccgagcttgttggcccggccgaactggcttttgaatccgcggccggcgaattcgagaagcgtttcgacgccctcggcccggaaccggcgggccagctcgaccgccttcgttttggccgcgtccccggcgtggacgatataaacgaaccggcgcggctcgggcttgagggtcagcagggcgatcaagcgctcgacgccgcaggcgaaaccgatgccgcagatatccggtccgccgaaatccttcatcatatcgtcgtagcggcctccgcccaatacggcattctgctggccggcgcccgtttgaacgacctcgaaggcggttttcgtgtagtaatccaggccgcggacgagcgcgggctcgaaccggtaggaaacgccggaaagatccagagttttccggacgccggcgaaatggtcccggcattcggaacagagaaattccgggatggcgggaaaagacgcggccaactcccggcaggaggcgaccttgcagtcgaaaattcggaggggattggtctcgatcttgcgccggcagtcctcgcacaagccgtcccggactttttcggcctgggtccggagggcccgggcgtacgcgggccggcaggtcttgcagcccaccgaattcaccagcgtttcggtcccggtcacgcccaggatccggagcatcgtgtcggccatttcgatgatctcggcgtcgacggccgggtccttttccccgaaaacctcggcgtcgatctggtggaactggcggtagcggcctttctggggcttgtcatagcggaacatcgggccgatgtagtagtagcgcatcggcgtccccagcaggtcgagccggtgctccacgatcgcccgggcgaccgacggcgtgtactccggccggagggtgatcgacctcccgcccttgtccgtgaaggtgtacatctccttctgaacgatgtcggtcgtccggccggtgcctttctcaaagagctcggtcggctcgatgaccggcgcccggagctcccggtagccgtaccggccgaaaagcgccgccacctcggcctcgactttttgccagacctcgacctcgccgggaaggatgtcgtgggtgcccttgacggccgcgagcgcctttttcggagtcgggtccgcgctcacgggacgacgtagacccccatcttgcggaacttggcgtagcgctcttcgacgagctcgtcggcggtcttggcttggagcttggtcagggtttggtggaggacttgatccgtgtttttgaaggccgtctccggatcgatatgcgcgccgcccggcggctccgggatgattttatcgatgacgccgagcgccagcaagtcggaagcccggatatgcaggttttcagcggcttggcggacggccgattggtccttccagagaatcgccgcgcagccctcgggcgaaataaccgaataataggcgttttcgagcatgaggatccggttgccgacgccgatgcccagcgccccgccgcttcctccctcgccgatgatcaggcagatgatcggcacccggagcccggacatgaccttcaggttgtaggcgatcgcctcggcctggccccgctcctcggccccgatgccgggataagcgccctgcgtgtcaatgaaagtaatgattggaaagccgaatttttccgcttcccggaagatgcgataggctttgcggtacccctcgggattcatctggccgaagttgcggtcgagccgttcgcgggtcgtccggcccttctgatggcccatgacggctacggtccgccccttatagaaggccagtccggcgaccagggccggatcatcggcgaaccggcggtccccgtgcatctccatgaaatcagttgtcagggctttgatgtaatcgagggtcatcggccgcttgggatgccgggcgacctgaacgatctgactcgggatcaggccgggctggattttccgccattcggcctcgatctcaaggcgcagagcggccgctttttcattgaagccgggttcgccggccaggaccagggcgtcgatctgttctttcaaggcgacgatcggtttttcaagcgtgtagaaatcctcgggtttcgtcattgagctctctgcaattggaaatgatacccagatattctataagccggccggaacgcctgtcaaggacgtgaatcgcgccatctaaaatcctgccgaagggtgatatatcttgccatttaaaaatcttaccgggactggacaaggaaaaggacgtttttttacgctctcctctttatctgaggagggcggagaatggatcttcacagccggagggagctcatggaattcaggtcaaaacgatctcgtcaagcctcggctccggtcaggttcttaaatggcaagaccatgcccttttgggcaaagtctttataacgcgggacagggaacggagatcccgccgctcccggcccgcgagacgggaactcagggggacggcttcggcttttttttcgttgaaatccggaagggaacgtacagaggacaaaatccaatgaagctcgtcacgatgaaaacgaccgcgacgattcccaaaacgacggcccaaactccgttgatcacttccaggcagtagaggaccacgatcgcggcggccgccgcgatccggacgagccggtcaaccacccccatgttggttttcatcagtctctcctttccgagggacaagcccccccttttttaaaagataattccaaagagaggaaaggtcaaggcggagaccgggcgccggaacggctccggaggaagaggcatcggaatccgcgccctgtgacaacggcgttatcgacgatccgtccgcggaatgttattgatttttcgcatcaacggtccgggcgaagcgcgcccgagggggtcgaccgctggcgggcgatctcgaagaaaaagaccgaggcggccgaggcgacgttgagggaattaacccgcccccgcatcgggatggagagaacccggtcgcatttccggcggataaggggccgaaggccttttccctccgaaccgaggacgacggccacggcgacggtgtagtcgaactcgaaataccggccgtcgccgccgctttccgccccgacaagccaaaagccgcgctttttaagcgcgtccatggtttgggcgaggttcgggacgcgggcgacccggaggtgttcgagggctccggccgacacctcgaagacggtctcggtcaggccggccgagcggcgctcgggcaggacgatgccgtcggcgcccgcgccctcggcgctccggagaacggcccccaggttttggggatcctcgatctcatccagaaggacgaggaatggggacggaccggcggaggcgaggatctcttcgagggaaacatattccttcggagagagaaccgccacgacgccctgatgatggggagacattttgtcgagagcctgttttgggagaaagacgcagggaatgcggtttgccttcgccaagccaacgatcgttccgacggggcgatggccctcttctttctggagaaacagcttgttgatccgccgcggggaggcccggagaatctcgacgacgggattgatgcggttgacttgatccatggggaatccttccgcattatacgccgatccggccggaaaatccgggaacgccgtatccttccttcggcgcccggccggccatgccggatccgcgatcggccgggaaatggggaaatggttaaacaggttctgatttggccgaagggggggaaaccgggcgccggaacatccgttccggcgcccgggaagaaacgcagaggaaagaaatcttaccgtttctggacgtcgtccatgctgagcgtggccttcttggtgaagcccgccgggatcccgtagattccggccggcgcggccttcatggagatctccgcgacggtggtcgtcgagtggatcttggcccccatcatctcggcgttcacttccgaggcgatctggtagcccttgatcttcatcatttccttcaccgaggcgtcgtccagccgcatcatccctttcgtcatggccggcatgaatctttcggagaacttcgcccagtcgaaggcgacttcggtcgaggcccaaatcttggttttcatgggcatgcccatgaccgtcatggtcatgtcatagccctggcagttccacgacccgacctttttcgtctctccagtcggattcacggtcgccgacatgacgaacatcccggccatcgaggccatttcggccggcaggagcttggcgaaatcaaccggaagcgccgtttcgacgtaggacttttcggccatgttgatcatggcgaaggtgttcttggccaagtcgatcaccgtccggccgtcctggctgaccatggccagggcgttgtcgccgatccacagctcggagacggtgtcggtggccggcgtggtctgtcccatcatcgacatggcgtcggtatgggaattgctcttgatgtaaacgtccgcgctcaggaacagggcggacgcggcgatgatcaacattcccgcgatgaattttttcatgacgatttttcctttcccgcgcgccgcggaacgccgcgggcgggcgcggtgtcttggtcgtatccgtccggaccgcttacttgcccaggacgaacgtcaccccgagcacgccgccgaatccggaccagtgccccgtcagggatccgaccaggcgcaggctgacggccattttcggattaaaatagtaccgcccgccgacgaaaatcgggatatagatgcccgagctgcccgtgccgccgattccgccgccggaagaatctttccatttccaggaataggcggagtagccgaggccgcctccggcgtacaaatcaaacttttccgcgttgagcttggtgaaatggtaggcgacgtcggcgttgaagttgatgagggtggacgaccagtattcttcgctccacatgttgagcatgaccgatccgccgatcccgatgttctctgtgaggccgtattcggcgttcacgccgaaggggatgctccctccccagctgttcaccccgatctgcggagtcacatagattccgcccttccaaaattccttcgtcccggccgcggccgtcccggccagaaccgccagagctaataccgtcaccataatctttcgtttcatggattctcctttcaatcagatagtggcttgagtcccatgatagaaaccgggagggcgattgtcaagaattttttatttttcctatgatttaagtcatatctctctttttccaccttattttccgccttgccgccccctccgggaacgccgccggtttcttctttttggggccgggtcgatccggtttcggctgaatcctctctgaataaaatcgatccggacgtccccctccccttccgtttcgggcttgccttatggtagaaagaatcgatgcgccggaaaaccctccgttttcttctccgcctggccctcggactgggcggcctggccgcggttttctttctctcccgggccaagctgcccgaaatcggccgggccctcggcggcgccgactgggggctcctggccctctcgttctgtctccacgccctgggtcttctcatcagcgtccaccgctggcggatcttggcccgggcccagggcgacgacatcccgttcggctttctggcgaaatcctacctcatcggcaagttcttcaacacctttctcccgacgagcttcggcggcgacgtcgtccgcatctgggacggatcgaaatattcctcgtcgatcgtcaagtcgtcggccatcgtcgtcgtcgaacggatgaccggcgtcatcgtcctcttcttcttcgccctggccgcctcgctcggccgcctggagatggccgggaaggtcccgttcatcggggcggccttagtcctcggaacggccgggctggcgtccgcggccgtcttcttcctccccctcaccggccggtggctccgcgggggcgagccggacggacttctccggaaagcgcgggacaaggcgcttcttttccgggaggcgatcctgtcctaccgccgccggccccggccgtttttccgggcgatgctgtgggccgtgtttctccagctgaacgtcatcgtctacttcatcctgatcggaatatccctggatctccccatcccggcgttcgattatttcatcttcatccccctcgttctcctcgtccagatgcttccggtcacgatcaacggcctggccgtccgggagggggcctatgtggcgatcttcgcttattacgggctgtcctcatcggccgccctgtcttacgccttcgtcgacttggcctacagtctggtcatcggggcggcgggggcggtcctctacctgacgcgccgatgagccgccggaggatcgtcacggccgtcctgggcggctggcttgtcttcgcccccttcctcgcccggtccgctttcggccaatccgagccggccgcggcctccggtcaagccgtcgaatacgaaaagcgcctggccgagatccgcggcgacatcgaacggctccgggcgaagctcggcgatgaggaaaagcgggaaagaaccgttctctcccagctggaccggatcgccgtccggaaacgccttctccgaagcgaatggaagctcctccaggtccagctcgcccggacccgggccgaccgggacgccgtcggccgaagcatcccggaaatgcgcaacgccctggccgccgaccgcgaccggctggcccgggttctcctcaccatctacaagcacggccgtttcagcgtcgcccgctatgccctggaagcgcgcgatctgcgaaccttcgtcgaccagatccgggcgctcgaagccgtcgccggagcccaggaccgggtcatcgccgatttcctctcccggctggccgccctgggccaagccgaccgggagctgggggaaaaggaggccgagatcgccgccttgacgaagcagtcgacggccaagcaggccgagctcgaggccgaggaaaagaagaaccggacgctcgtcgcccagattaaaaccaaccaaaaaacctacgaacaggccatcggcgagctcaaccagcgcgcccgggagctcgaaaagcttctccgcgacctggaatcccgtcctcatccgggcgttttccccggcctgccgttcggcgagaccaagggccgcctcgactggccggtcgacggacgcgtcacccaaaattacggactgcaaaagggcagcttcaacacgaaaaccgagaacaacggcatcgagatcaccccgtccccaggggatttgactatccgggccatccatgccggaaaggtcgtctacgccgatttcttcccgagctacggcaacctcctcatcctcgagcacggcggcggctaccactcgctctacggtcattgcgccgaattcctcgtccgcaacggcgacttcgtcgggcccggaacgcccctggccgtcgccggcgacaccgcctcgctctcggggatttccctctatttcgagatccgctaccagaccaagcccgtcaatcccttgctttggcttcggcgaaggtgataggatttctccttacggagccaacgaccccgatgaagctaccccgtccccggatccttgtttcctatggcctggcggccgcggccttcttcctcctcctctgggtccgcccgcccttgcagtcctcgaaacttcctccggccaaggatttcgacatcctggaccgggccatcgagcatatccgcgacgattatgtcaatgaaacgaacccgcttcagacgatggaaggcgctttccgagggctcatcggagccctcgacccggcctcggcctatctgagctccgaattgacggcccgggcgtcttctccccgcctcgagcggctttacgacatcggcttggccgcttataagcggccgggcgcgtttcccgtcgtcgtcgcggtcgttgaggggtcgcccgcggagaaagccggcatccagccgggagacgcggtcagcgcggtcgacgaccgctccacccttgtctggagccacaacgagttccgcttcgccttgaagagcgagaaacccgcgccggtcaagctccgcttgatccatgaaaatgaaaccctcgagaaaaccgtcgaccggtacgccccgtatcccgctcccgtagcctggacggccgagcccggaacggcggggatcgtccggatccaccatcttttttccggagcgatggacgccttccgcacgatcgttcttcctcaagttgcgggccgcaagaacacgctcattctcgacctgcgcggctgccgcgaaggcgagatcgaggaggcgcgcggcttggtcaatctcttcctgaaaagcccccgggccggaacgttcgagaaaaaaggcggcatcaagaccgtttgggcttgcccggccgaacccgttctgcccgatgtccctctggtcgtctgggtggacccggcgacgatgggcccggccgaaatcgcggccggcgtcctccgcgacttcaagcgggcgaccgtcgtcggaaccccgacggccggcttaacggccgaacagaggctcctgccgctcgacgccggagacggattgctgctgacggtcggcgcattcaccctcgcctcgggggaggccctgtttgaaaaaggcctcacgccggacgtgaaaatcggtccggggaaaaaaaccggcgcggattatctcgaaaaaaccaagggcctgcccggcagccggcgcccatgaagcggaagcggcgccggcccttggcctggctcatcccgctggctctcgcgattctgacggccgttatcgccttccttctgaccaggccgcggccgacagggacatcccccgccggccctccctccaaatccggcccggcggcgaaaaagcggatgccgccggcgtcttccgttcccctggccgcgatcatcatcgacgacatcggttacagcctggaggcggtcgaaagcatctacgccgtcggccgcccgctcaccgtggccatcctgccggatgcggacttgacggaggaatcggcccgcttggccgccgcctgcggattggagatcatgctccatctgcccctggaatccaacgggaacaagaccgatccggcgggctccggcccggcgatccgggaggggaagtcccgcggagagatccgggccgagattgatcgttgcctcgcccgggtcccgggcgcccgcggcctcaacaatcacgagggctcggcgacgacggaaaaggcggagttgatgcgcccgattctcgagatcctcaaggagcggggactttatttcatcgacagccggacgaccgcggccaccgtcgccctgcgggaagccggccggataggagtccgggccgccgcccgccgggtttttctcgacacggaacgcggcgatgaggcctttgccgccgggctccgggagctcttccgctcagcgaaggaaaatggacgggccgtcgcgatctgccatccgaagcgcgagtcgctcgccgccctggcccgtcacgtcggcttggccgaatccttcggcgtccgcctcgttttcgcctccgcggtcgtcgaatgaggacccgatccggccggtatcagaagccgatcccggccatgatcaaaagcgcgccgtttttggcctcgagggcttccccctccacttcatagcagttcatcaggccgagcgtataacggagacccagagtgagtctattgacgccgatgggcaactccccccccgccccgaacgccaggccgaggtccaaagacttcattcccttgatgtcatcggttatcaactcgccttgccattcaaaacgcatggtcgctccgaccttgaaggcgaaagccggtccgccgaaaatgaagaccttcacgcccggcccgacggtaaaagaatatttcgccagaatcggcagttccaggtagctcaagcggaaattgagattgagatcgttgtccggccacttcgtccctttctgaacgaacaagagctccggttgaacggacaattcgtcgatgatattgaaggtcaggaatccgcccagggcgaagctcatccaggcatcatgtcttccgatatcctcgccgctccatctggagagagaaagacccagcataatccccttgcccgtgatttgaaccgcctgggccgggacgacggccagggttagaaacaagggtaaaacggccgcggcggccgagaattttctcatgttcactcctcctcaaaaccatgatggaagcaatctatcaatcagagggacgagcgtcaaggccgtggatcacgttttctaaaatccagccgaggggcgatatgtccttccatttaaaaatcttaccccggctggattgaaaaaagggttttttcgatttgtcttcggtcaaggattttatagaacgctgcggccgaacccttctttcgttccgagagcccccgccggcctagtcccgccggacctcgaacaagaccgtgttttcggcgatgtccttgaggctcttgccggacgcccctcgcggcaggatccagcagtgggcttttttcccctggaaataatccatagcgtgggtgatgacccgccgcagggggaccggttcccgggcgaccaggttcaagacgatcatcagccagttgatcgaatagtggctgatgttcgaaccgccgcggaggaactgggtcacggacggaccggccgttttcttcttggcgtggccgaagtcaggagcatccggtcttccgatggttttcaagccggccgtccgggccgattcccgggcccaagcggcgaccgcctcgcaggacgaaattcgatcgaaatcgcaatcgaagatgtccatgacgagctcgaaggccggggcgaagcccgtctcgacgggcagccggaacgagggcttgaagatttcggccgcttcggccggccgcggacggcggatctccccggccggccccccggacgcccctgagcggtaaatcagggagtcgcggcgcaccttccggatgtcggcgaaaacgccccgcggcagggaccagcagaccgccgcatcggccccgaaaaatccggtggtgaacgccgcggcctcgtcccgcggaagccgggcgcaggtgaagcagttggctgaggccgtattcccgaaccggcggaaattgatggcgctcgtctcgatatactggacgagcgtgtcgtcatccctccaggcgggatcggagaccatggggtccccgaagggaagcatgccgatcgcctggcaaagctcccggctccactttccaacccgcggccgggacggcggccggccggaaagagggaagtccaggacgatttcctcgccgtacttgtcgacctcgaggcgcctctggaactcgggatacggaacggccgagatgtcgggggaataccagctggtccggatccccgcggccttgaaattgcgccgggcgttgcgcgcggccgccttgaaaacgttccggccgcgggacccggcggtcaggctgaacggcccgcccaggtagctgacgttcgtgaactggacgacctggacgtcgtcgaaaatccgctccatctgccgccagcttcccggcgcctcaaacggctggagaagaagagccccggtctgatggatggtgacgccgccttcgcggagggcgtcgtagacgctctcgtaaaagctggtgtcgaagaggcttttggccgggccgacggggtcggtcgagtcgatgatgatcacgtcgcaccggcctttcatcttccggatcacctcggccccgtcgccgatgatcaggcggaagcggggatcatcccaaactccggcggaaatccccggaaggtgcgtccggcactgctcgatgacgacccggtcgatctcggccatcgtcacgcttttaactccgggatggcggaggacggcccgggcgacgccgccgtcgccgccgccgatgatcaagacgttttccggagtcttgggggtggcgaacagcggccaaaggccgatccattcatgataaatgccctcgtcttcctcggtcagctggacgattccgtccagaatcaggacccgcccgaaccgctcggtgtcgaggatcatcagcttctggaagccggtcggcgtttcagggacgacgatccgcttgaccttgaacccgtaggtcacatcggagtagagatcttcgtaaaaccagagatccttgccgcgcttcaccaggcccatgacattcgtcctttcatcgacatttcgtggaatttcattatagcgaaaccgcgccgaggcgcaaggaaacccgggaccgttcttgctttcccccaccggacgggttatgatcaagaggtccgacaggaggaacatgatgagacgcatcttccccgcttccggagtcgccttggcggtcgtcgcggccctgatctggctgggacagacggggtgcaaatcctacaacgaacaggaggtccattcgtccctggaggtcgtcgacgtgagcaccagctggacgatgaaggaataccggcaatggccgaatcctaagctgaccctggtcccgacggtgaccttcaagctcaagaacaactcgtccgaaaccctccgctacatcaacgtcaacgccatcttcaaagaggtggactcggtcgagaacctgggcgacagctttcatacggcggtccggggcgaaggcctcgcccctggcgcgaccagcccgccgatcaccctgaaatccaatttcggcgtggccggtaaaaccctcgactctttcaaggccaatccccattggaagtcgtattacgtcaagcttttcgtccaaatgggcggtccgcgccatatttcgatgggcgaatatccggtgtcccggcagatcgatttccaagaagaccaggccgtccaccagaaggacgaatcgtcggccgtcctgcaggaagagccggcgaaggattagcctcccggaggagacaagccggccggattctttctctccgccgccgtccggcagcgggggagtcctcatgaacaccgagaaggcggaaggcggaggagttccgccgcggcttcccgccgccgggggcggtgtcggctggccggccggccgcttgggaaaagcggtcggcgtcttcatctttttcactctcgtcgcttcggcggtctatgccttgatcggggcggtccgcgctccgggggcggccgccgtctccacggccgcttctgggaaggtccgcagcgactatgttctcatgctcctcgagtcctgcctcggtcttctcatcctgtttcttccctcgatgctcgagaagcgcttccggatcatccttcccagccggatgtacctcctcttcgttgtcttcctctacgccgccatcttcctgggggaagtccgcgacttttactaccggatcccgcactgggacgtcatcctccacgcgttcagcgggatcatgctcggagcgctcgggttttcaatcgtcagccttctcaataaaagcgaaaaagtagccgtgacgctgagcccccagttcgtcgccctgttcgctttctcgttcgcgctttcgctgggcgttctctgggagatctatgaattcgcggccgacggcgtcctcgggctcaacatgcagaagttcgccctggaggataaaacctcgctcgtcgggcgggcggcccttgtcgacacgatgaaggatctcatcgtcgacgccctggccgccttggccgtgtcggtcttcggcttcctttcgatgaaggccgaaaaaagctggatcgcccgggtggccctcaagcggaaaccggaagccgtcagttgaggtcggcgaacggatcgggcttgagaatcttgatgtagtttttcgatttgatctcggccagaaacttatccacctcggcgttttgcttctgcgtgccgattttttcggtgatcgccccccgggattcgtcaaaagtccggagccggctgtccttcttttcctcaaccaggatcaaataccagccgttcttggactgaacccagggcgtcatcccgcctttgttcaacggcttgacggccgccagcagcgtccggtcgagctcgccttccttgaacgtccccaggcttcccttggccgccttgagcggctcgtcggaatcggcctcggccacctccgcgaacggcgcgcctcccttgatcttcgcttcgatctcggccttgcgagcttccagggcggcggcctcccggccctcgatcgccaagtagaccgcccggagctcatattcctcgggaacaacgaattcgtcctggtgctttttataataatcgacaatctcggcgtcgtcgatcaccactttctgcccgatttgattacggaggacggcttcccgcaggatctgcttttccatcgtggcgatccactcgtcgtagttgtatccctgttgggccagggcccgcttcaacatctcatcgttttcgatatcattggcccgcttgatattctcgacgaccattttcagctggtccgtgacgttgatgttcatcttgcgggccatctggatgagcaacaggtccgtgatcatttcgtcgaggatgtgggccttggtgtattcgatcgcccgctccagttcctccccccggtactgggcccgggcggccatgagacgctcctcgtattccgtcttgaaatcggagagggtgatgatgtcgtcgttgacgacggcgatgatttcctcgatgacctgccgggccgggacggcgaccgccgcgacaagaaggagagagacggccaggatgattttcttcttcgacatggcaccttccttatcaggatcccggatacacgaacggcagattctccgtccggattttccaggacatcgtttctttcagggatgcgacgcgggcgtcccgggccgcttgatttttctgttcgagaagacgggcttcgatcaaagggacggtctcgcctcgagaccggagccggggctcgaatttccggtcgagccggaagatatggtagccatagggagactggaccacccggctgatccggccttcctccagggcgaagatgactttttccagctccagggggagttggccgaggctgaaaacgcccatcagtccgccgtttttcgcctcgggtccttccgaagacgtccgggcggcctcacggaactcgttttcgccggccgaacggatcttttccaggatttcgctggcccggccttccgaggaaaggagaatctggctcacctggaggcgctccggctggaggaattcgttcttgtgggcttcgtaataggcggcgatctcatcctccggaaccgtgattcccgatatttccaaggccatgtacttctcaacgaggacgccttccaggagatccgcgttgtcggcctcggaggacgaaacggctccctcggcccggttcagcttgaaaaccgccagggatttctctttttcctcgtcgctcaagtcgatcccgcgggcggccgccgagaggacgatcagcttcctttcgacgaaatcatcgaacagccggccggccgcctcggccgtcaaggaggcctcgggctcgccgaccgtcaagcgggcgaaccgggcgaaatcagcattggtgaaggcaattccctcgaccgtcaagaccggaagagcggctttttgcggatcgtccagacggaatccctcggaagcgggaggagatccggtcttgccgccgcaggctcccgcccccaggcagagagccgccgccgccaaaacagccgccgccaaaaagtccggattgcgcttcatctgtgccaaatgccaatgagttattttatcccatccctgacaactccagcaagagccgggcggtttcacacagaacgccggctgaggcgggggagcggagcggcaggctgagaacgccttccggagtcattgatccccgcatcttgttgagaagacttgaaatccgggctggatcaacatccgttgaaggttggaatttgagaatcagcttccggtcgacgcgatcgacggccgaaagcttcagacgctgggccagaatcttgatccggccgtattggaggagatgttcgacgctcggcggctgcgggccgaagcggtcccggatttcctcctccagcgaccggatctcatccaggtccgcggccgaggaaatccgcttatacaagctgagccgcacgttgatggccgggatgtaggcctcggggattcggacctcgacccgaagattgatctcgcaccgggcctcctcgacctccccgcccttgagctccttgatcgcctgctccaggagatggatgaagtagtcgtatccaacggcttccatcgtcccatgttgctgctctccgaacagatggccggcgccccggatttccagatccttcatcgccagacggaatccggatccgagctcgctgaattccttgatggcttcgaggcgcttgcgggcgatcggagtcagctcggcgaacggcggaacgagaaaataggcgaaggcctggcgggaagaccgtccgacccggccgcgcagctggtagagctgggccaagccgaaatgatcggcccgctggacgatcagggtgttgaccagggggatgtcgattccgttttcgatgatcgtcgtcgagaccaggacatcgtacttctggttgatgaaatcaatcatcttcatttcgagctcggccggagccatccggccgtggaccacggccaagcgggcgtccgggacccattcccggatcttcgccggcaaggaatccatctcctcgattttgttgaggacgtaatagacctgccccccgcgggcgatctcctgccggatcgcggccgcgatcagcctcggagaaaacgtcgtcacgaccgtgtgaacggccagccggtccttgggcggcgtttcgatcaggctgatatcgcggaggccggtcagggacaggttaagggtccgggggatcggcgtggccgtcagcgtcaagacgtcgacgctggccttgagatgcttgattttttccttgtgggcgactccaaaccgctgctcctcgtcgacaacaagcagtcccaggtcgcggaaagccacgtcagccgaaaggagacggtgcgttccgatgatgatgtcgacgcggccgttcttcaggtcctcgatgatccggcgccgttcggcggccggttggaaccgggacagggcggcgacccggaccgggaacagaaccatccgcccggagaacgtcttgtaatgctggctggccaggacggtcgtgggacaaaggacggcgacctgcttgccgtccatgaccgccttgaaggcggcccggacggcgacctccgtctttccgtagccgacgtcgccgcagagcaaccggtccatgggcgcggccgtctccatatccgtcttgatctcctttatggagcggagctggtcctcggtttcctcgaactcgaaggttttttcaaattcgtcctgccagcggccctccgggctgaaagcgaatcccttgatggctttgcgccgggcataaagatccaggagctcccgggccagcttctggacggcttttttcgtccgctccttggttttcagccaatggccggttccgagcttgtccagcagcggttggccggctccgacgggcgtatatttctgaacgaggctcaagtcctcgaccgggacgaacaacgtgtctccgtcccggtagccgagctccatgaattccgccgcccggtcctccacgtccattttgaccaggccccggaacacgcccacgccataatcggcatggacgatatagtctccggccctcaggtcctgaaaatgggtgatcgagggccgggccgcgggccgggcggggatgatccgctcctcggtgagaatgtccttctcggcgaagaaatggatcttttgccgcggatagctgaagccccgctcgagatcgcccaggcagagacggatctcgccgccggcggccgccggaagaggcgaatccgcttcgagcgaggggatctccttggtttcgagaagggccccgatcttcttccgcatcggcggcgtggataaaaagatgacgcagcggtcgcgctcctcgtaaatccgtctcatcgtctcaaggaagaagaagatcttgttgtcgaaacgaggcacgggctgaaagccgaaggcgatttcccggcgggctccggccggtgcgagctccccgcaataaaccgcctcggcgcggagccgttcgaacagggccggaggatagatcgattcgaagggcggacctgcggggccgtcctgcggcccggccccggcccgcgaggggaggtcggttctcgcctcgtcccactccttctcgatctcttccggatggtcgaagacgaacaccgcgtcggcgaggtaccgggtgaacggaacggaggcggcggccggagcggcggtcccctccgaaagcgaggggatgagagccgcctcggtctggcggacggcccgctgggtggacggatcaaactcgcggagggaaacgacgcggtcgccgccgaattcgatccggaccggatttttctgccagggggagaagacatcgacgattccgccccgataggcgtactccccgcggaaggcgatcaaatcctcgcgcgcatacccgaaagaggccagccgctcgatcacccggtcccggccgcactcggcgtccttgttcaggcggagaaaaagctcagggaggcattccggagccggaaacggccgcaggagcccgaaaagattggtcacggtcagggccggcgggcgattcagcagatcataaaaatagcgcatccgggtggccgccgactccagggacggggcggcgtccggggcgggattctccgagagcgcgggaaagctccggacggttttcgtcgagccgaggttctggaggaaaaaacgggcctgatcctcgaagccggacaacggacgggcggacggacggatgaagacaacccggcgcggcccagtcagggccaactggacgaaaaggtaggggacggccgcctccgtcaagccggaaatcgaaagacgcggccggtcctcttctccgaaaagaagggcctggccctcgggggttttcggaagggacgaaaccgcccggacgaggtccttgaattccggcgtctccttcagaaaatccaggctcatgggacgaacgaagattatacgcgaatccgggccgcaattcccgcgtcccgccgctcgaccgcctcaagcatgtttcatgattttccgtctttttgaccctcgcgttcccggcgaagcccgggcggacggaaccggcgtttgccccgcccccctcctcgagattatcccccaaaagggaacgacggcaaaaacggacgccgatctcgggagaagcgttgcgtcgctctcgtccagatggatcggagaaacgctcgacccggtcttctcccgcatgtccctggaagtcggggaaaggggaggccgttttgttttcggcgttcgtttcgcgagcgcgggatgaacgcaatgaaaagaactcgattaaaacaaagaggaagggtcggtcggcgcggaggaaacgccgccgaaaaacggagcgcgggggagagagattgtctccccgtccggccgcacgtataatgagctcttcccggccgccggattccgccggatttccggggagacgccggccgcaaggagtaatgcatgttccgattccgagcccgcctccaggccttcgccgtcctcgctttgatggtcgccgccttgggaatgctcgttccgccggccgcggccgcccaaaattcatcggccccggaacgctttttcgacacggcccgagcccccaaggatctcgtccggttggttattttctacccggcccccaacacgttccgtcatcttctcgccctcaaggccgaggggatgcttcccatcgacaacctggaaatcgtcggcgtctaccatgtcaaggagcggaccgactaccgcgaatccgtccgtttcgtccgggacaacaagctggccaacgtccacttccatgcggtttcggccgagctgggaatcgcctcgctttaccaagcgaacgcggcctcggctgagttccggaaaatcttcgacctctccgacgggatcattttcttcggcggaccggacatgcctccggcggcctacggcgaagagacggatttccggaccgtcgtcgagaatccttaccgtcattatctcgagctgtcgatgatcttccatctcctgggcggcggccggaacccggatttcaaggccttcttggaggaccggccggattaccccgtcctcggcatctgtctcggcatgcagagcctttgggtcggcacgggcggaacgatgattcaggatctctggagcgaaatctacgggaaaacgaccgtcgaggacgtcctcgccctcccccgggacgagtggcataagaatccctacgagatgatcgctccgcacgatccggccctggccccttacatgctccaccccgtccgtctccttcctgaaagccgcgtttggaaggccatgggcccggctttggacggctatcccctggccgccagctcccaccaccaggccgcggacacgcccggcaagggcttcgccgtcgccgcccgctcgatggacgggaaaatcatcgaggcgatcgagcacgagcgatatccccatgtgctcggcgtccagttccacccggaattccggaagctctgggacccggcgccggagttcaagatcgggccggacgacggggcgctgttttcgttccggacgctgatcgaagcccatcccccaagcttcgagttccacaagaggctgtggtcctggtttttcgaggcggtccgggacggctcccggacatagggagagcttcttttccaggccgttccgccgtcagcggcggcgggccgatctccggattttttcgatgaggttcgtgctggagtggccgcggcggtatgggacgcggtacacccgtcccccggccgcctcgacgtccgccgttccgacgatttcgcccgcgccccaatctccgcccttgaccaggacgtcgggcagcagggcggcgatgatcttttggggcgtatcgtcctcaaaccaagtcacatagtcgatatctccgaacgcggccaggacctccatccgctcggccagcggaaacaccggccggctcgggcccttcagcctccggaccgaggcgtcggaattgacggccacgatcaggatgtcgccctgggccttggcccggcggaagagatggacgtgcccgccgtggatcagatcaaagcagccgttggtgaagaccgtctttaagccttggcggcgccagccggcccgcaggcgcttcaaggcggccgccgaacgaatctttctcatctcatttcgccggcgatttgatcttgatctccggggagaattcccaggcatggtccaagcgggccacgccctcgtcccggatcatcgaggaaacgaggaaggaatacatgttccggtggtaatcatatgggtatccgtcgcgcttatgagcggccaggtcgaggtaataggtcccgttgatcaggggaagcgactcgatccggcagacgacccggccctcccccgaaaaagcgacggactcgaactcctccaggcgggtgttcgtcccgtagcacaacacccccatggagttgaaaacagcgaggccgaacacgaaatccttgaccggctcgcgggcggcgatgtccatatcgatcaccatcgtctcgccgggacggaagacgtgcttttcctccccctggccgttccgaagaacgacccgccggatctccacttcccgcttgccccagcgctgttcgcggcgtccttcctcggcggcggccggcggttcggccgcgggggcgggggcttcggccggagccgcggtcacggcggcttccgccgccgggccttgctccaagcgggcggaggccggcccttccgcggccggcgggggggccggaacggcgacgacggccgcggccgcttcctccttccgctcgcggaactcggcctcctgcgcctcggtgacatcctgcatataagcgtcgacgaccctcttgggctcgtcgatcatccggatctttccgttcttcatccaggccaccgtgttgcagatcttggccacggtggacaggtcgtggctgacgaacaggatcgtctttttccggcggcggaaatcgtcgatccggtcgagacacttgggaacgaaggccgcgtcgccgacggccaggacctcgtcgatgagcaggacctcgggattgacgttgatggcgatggaaaatcccagccgcatgtacatccccgaggaatacgtcttgaccggagcctcgatgaaatcctcgagctcggcgaagcggacgatctcgtcgaacttgcgggcgatctccttcttggacagcccgagcatgatgccgttgatatacacgttttcccggcccgagatttccggatggaacccggcgcccagctcgatcagggccgaaaccttgcccgtcaccaagatccgcccggaggagggcttggcgatcccggcgaccatcttcaggatcgtgctcttgcccgagccgttctccccgatcagaccgaaggtttgccctttctcgacgctgaagctgacgtcgtcgacggcccggacgagctcgtccggcttgagcgacccgaacaggcttcccttgacgatggcgctcttgaacgtctggaaccggtgccgggaggagtatttctggtagatccggctgacgcggtccaactcgatggcggccatcagacttcctccgggaaggagtcgcggaggcggtcgaagacggcgtagccgatcacgaacaggaccagggagacgatcaacgtgactcccagccgcttccagtggatcatttgcccgaagaagaggcagtcgtggtagcccccgatgatatgggtcatcgggttgagatcgaggacggcccggagggccggcgagtgctccagcatcccgagagaatagacgatcggcgtggagaagaaccagaacgtcagcaagttgctgaggatgtccttgatgtcccggaagtgaacggtcagggcggacaacaggaggctgaagcccagggaaaagacgaactggaccaggaggacggccggcagcaggaggaggtagaccgtcggcggcttgccgaaaacaaacaggaagatgagcaggatcggcaggccgaagaggaagtggatgaagttcgaggtgaccgagacgatggggaggacctcggccgggaagaggatcttcttgatgaggttgccgttgaccatcaggacgttggccgaatcgttcaacgatgacgaaaaccacgtccagggcaggatcccggcgaacaagtacagggcatacatccagggcccctcgccgagagtaggatcgcgcggcttgaggatgaatccgaaaacgacggtatagacgaccatcaggaggaacgggttgaagaaagaccagaagaagcccaggaccgtcccccggtagcgggccttcagctcccgtccgaccagcgtccggatgagaagccggtgcttgtaaacctcctggaggttagcgatgagtttcattcaacggtccctcgagcatcgccgccgcttccggtccgaattctccgccccggccgggatggaggacgagcggcgggagcacggtttcctcccccgaaaaagccgcggcgaaccggagctcggacagaaagaggttcggctcttcgccggcgcgcggatgaatccgccggattacaaccggccgcaggccgcggctccgggccgcggcccggaattcctcctcgcgggcggccgggtaaataaaaaaagcccgtccgtcgtctttcaggagctcggaaaccgcgcgcatgagttccataatatcgcacgttatttcatgttttgcaatcgccttctccctgtccgggcagggaaagccggtctttttcccatgatacgggggattggaaaccagcacgtcgaaccgcttcccgggccggaaggtccgcaggtcggcctcgacgacctcgatcctcccggacaggccgtttccggcgacgttccggcgggctatgtcggccagccgaggctggatctccaccgccgtgaggcgggcaaacggcttaaaacccagcaagacggcgatgacgccgtttcccgtccccagctcgcagacctcgtcccccggccggaggccggcgaacgccgccaagagcggagcatccgtggcgaaccggtatcctttcctcggctggatcaggcggacgcggccgcggtagaaatcatccagcgtttcgccgcgtcgcaaggggaaatccatcgccgctctctccgtctcattccgcggccggatcgccggagccggcgagcagcgcgaggacgtcctcgaaaatcatccgggtttccgcctcaaagcgcggacgggaaaacctccgggctttctcccgggcggcccgccccaaggcttctctttttcccggatcccggagaaggaacaacgtccgctccaagaggcgggccgtggagccggccaggaatccgttgattccatcatcgacgatctccggcagcccgcctccggcaaaaacgagcgggacgacggcgttctgcatggcttccaccgtggtcatcccgaaatgctccgtttggccgggatcctcgccgttcaggccgcacatgtgccagaacagggccgcgtcccggtaaagggatttcaactcggccgcggtgacgttgacccggagctcgatccggccggccgctccggcggccaactccctcaagccgtccaaataggcgttcccgggcccgcttcccccggccaggacgaacgtccagccgtccgccgcctccggcctttcccggagaagcttcaagaaggccttgatcatctccctctgcctcttgaatccctccggttcgaagcgggaggcggaaaggatcagcttcttcttgggaccggcttccccttcggcctccatgtcgacgggcggatacagaagccggtggggcgaaaacccccattttttttcgatccaggcggccgtgtagcggctgttgcagaccacccgggtataccggtcggcgtaaaaataagtccgcggccgccgttccgggaaatggcagatgaacacggagacgggagccaggggaaagaccatctcgttcatgctgttgttgacgaagacgtcatagccgccgctttcccggctgaggcggtggaacggattttcatcgacccgtccgaccaaggccgggtcgagatggatcaagttccgctcgtcgtagaagggaatcgggatcactttgaccgggcagccggagaggtccaagccgtaccatcgccggaattcctccggcccgacatcgcggttggccaggatcgtgaggtcgaacatgtcccggagggcggcggccatggtcagcccgtatttctgggccccgccgatgaaatgaaaggcatgatcatagacggccagggtcggtttccggaggccgagagccagttcccgcctccgaagggcgttgacggcggcctggattccccggcttcggacgagttcggccgtttcggcggccggttcggccccgcccatccgctgatccatttttccgctcatctcccttccgtccatgtccttccgaaagccggcgttcagccccgctccggatgttcgggaccgctcgaacccggctccgccgcccgcaagtcctcgagcttcgcccggagaaggaccaggtcctcctcgcagccggcgattcgcgcttccaaggctttaaaccgcgcctgcccccggacgtcccgcacatgcagggcccgcaacaggtccaagatccgccggtcgaactggcgctgtcgctccaggaagacattgaactgggcgaacgtcgtttccagaaggacccgtttcaagaaaacgatcggccggccgatggttttccgatgggaggagaccgcccggagatccggccgggcctcggccagggcgtccatcgaggccagaacctcctggagatggagctcgagctcccggtccgagtatccttccacgagagcggaaaactcccggtcgatttctccgccgaagagcttccggatgtcggccagctcctcccgcttgcggtccaactcctccctcagccgccggatttcctgctcaagcttgttcatcttcgaccgcctttccagaaagagatggggagcccagcaggcccgtcatgatatcctgaacctgggcgacggaaatgccctggatgcagcgcgcctcggaaaacaggcagttttgcgagcagggattgcacgtcaaacccaggtggacgaccgcgtgggccggcccccaaggccggaagcgggcgtattcacccggcccgaacaggccgacggaaacgacccccgcggcgaccgcgatatgcatcgggccggagtcgttgccgacgaagtaccggcaggatctcaggacggcggccatctcccggatcgtcgtcttcccggccaggttcaccgtcccctccggcttcaatccgcgctcgatctccgcggccagcgccgtttcggatttcgcggccaggatcaggatccgggcgccatggacgtcctggagccaccgcccgagggcgacgaaccgctccgccggccagcggcggaattcccagcgcgcgccgggagcgaaggcgatcacgagctccccggagccgatccgatgcccatccaggaggttccgggcttttttttcatcgtcggcggtcgtccaaaccttcaaggacgcgtcctcggaccgtcctccgagatgacggaggagatccgcctggtactcgacctcatgcttctcggcgccccgcgccgggccgtcggtgatcaggccgttgaggccgtttcttcccggtttggccggggcgttcggcggattgaggtaagccacccgcctcggggcgccgctggcggccatcaggatcagggaagccgcctggggggcgtcgttgttccagcgcagggaaaccgccaagtcgaagcggcgcttccggaacgtccggacggccagggtcaatcctttcaaccaccaccggacgcttccgtaaaaggcgtcgttccaacgagcgaagctccggtagggaaaagtcaggatctcgtcgacctcgggacatttttcgatgatattcaggccgccgggatggacggccaggacgatcttcgaccggggcaggagcgtccgcaggttccgcagaaacggcccggacaagacgatatcgccgaggtcggccaattggacgacgagcacttcccgcggctcgccgccggccggccgggagcgcctccggccgagccagcgatggattcccttgaggaccggaggaaacgcgaggagagacagccggcaggcggcgatccgcgccccgcctttcagcttggcggccaccgccttcggccgaaacaggcgccggatccgaatgagtacgccgctccaacggagccagcgctcggggcggccggacgcggacacgtcctcgccgccggccgcgtcctcctcgtcccgggatacggccgaaaacggccggggatccgcggcgatctcctccaggatcttttcgaccgcttccacggtccggtcgagcctgaaccgctcctcgatcgttttccgggcgttccgccgcagcatttcccggagggccggatcgtccagcagccgccggacggcccgggcgcaggcttccggattttccggaggaacgaccagggcgttgcggccgtcctcaaggacctcggaattcccgccccgggcggcggccacgaccggaaggccgcaggccatcgcttccagcaaggccggggtgatggatcccactcgggccgcgggatggaggaacaggtcgtggccgagaagcatgtccggcgacgacatgtccggggcatactcgacaaaggaaacatcgccggccgcgccggcttgctccgcccggtcttgcagggacgcgaggatctcggagaagccggaaagcggcccggcgaccgtcagggtcaagccggccccgcctggatctctcttcagcaagcccagggtccggacggcgacatcggcgccgtcttcgggcgtcaccggcccgagaaaaagcatgcggaccggccgcgccccggccgtttccttgaaaggaaaacggcggagatcgacgcccggcgggaagacggccgcccggcggaccggcttgccgacgcgttccgtcgcctccaggacataccggctggtgaagacggccgggagctcgtggagaggacgggggaaagcggaaaggccgaagcggcgggtgagaaagcggatcgccctccgcccgcgcggtcctcggggctgctcccggtaccagaggtcccgttcccaaacggccaggctgtcgccgtcgacatagaggcaggaggcgactcctaagctttcagccagaagcggcagcgaagccgaaatccggggcaaaccgaagaagagcgccgccgcgggccggaatccgaggatggattcccgaagggcggcctggttggccagctccttccggaaaacgtcggaccaggcgttccggtcggcccggtcgcggacaagccggcgaaggacgggctccgtcccaaggggcgcgcccggaaacgccccgccggccagtacgcggacttcgtgtcccctccgggtcagaccctcgacaaggccgcggcaggcgagatccgcggaagtccggtccgcgggaggatagccgccggtcacgacgaggatgcgcatgcgtcttctctctttatctcttttttttcaaatatatatcatcattggataaatcttggcaaaccgggcgcgggcgggggattccagggaacgaaacgcggaatccggtaattattccgccccgtcggccgaggaatcggcggccgccgtttcggtgaagaccaggacggaatccgggctgatttcggcgtacccgccgtcgatttcgaaccgctcctcataagcgccttgacggtaagacagcgtaccccgccccagggcgacgacaaggggccgatggaggggaaagacgccgatcaggccgtcgatggtcggaatctgggcctcgtcggcctgcgtctcgaccaagagcgctcccgaagtgacgacccggaggcgaaagcggtccggcgctttatcgctcacgcgtttttcagctcctcggcccggcggacgacgtcatcgatccccccgaccatgtaaaaagcttgctcgggcttgtcgtcgtggaggccctcgacgatctcgcggaagccgcggacggtctcgtcgatcgtcacatatttgccttcccggccggtgtattcctcggcgacatggaagggctgcgagaggaacctctggatcttgcgggcccgggcgacgatcagcttgtcctcgtcggacagctcctcgatcccgaggatggcgataatgtcctgaaggtccttgtagcgctggaggatctccttgaccctccgggcgacgcggtaatgctcgtcgccgacgacgcggggatcgaggatgcggctggtcgaggccaggggatcgaccgccgggtagatccccatctgggtcaaggcccggctcaaactggtcgaggcgtcgaggtgggagaacgtcgtggccggggccggatcggtgaaatcgtcggccgggacatagatcgcttggaccgaggtgatcgatcctttcttcgtcgaagtgatccgttcctgcagctcgcccagctcggtggccaggttcggctggtagccgacggccgagggcatccgtccgagcagggccgagacctccgctccggcctgggtgaagcggaagatgttgtcgatgaagaggaggatgtcctggttcatctcatcgcgaaaatactcggctaccgagagggccgtcaggccgacccggagccgggcgcccggcggctcggtcatctgcccgtagatcagggcggccttgtcgatgaccttgctttccttcatttccagccacagatcgttgccctcgcgcgtcctctccccgactccggcgaaaaccgaaaagccgccgtgcttcatggccacgttttggatgagctccatgatgatgacggtcttgccgacgcccgctccgccgaacaggccgatcttgccgcccttgaggaacggctggatgaggtcgatgaccttgatccccgtctcgaacatctccaagtgggtgttttggtcgtccagggtggggggttggcggtggatggggtaccggagggacgtctcgatcgggccgaggcggtcgaccggctcgccgatgacgttcatgacccggcccaggacttcgggcccgacggggaccgtgatcgggccgcccgtgtcgaccgctttcatcccccgggccaggccttcggtcgggtgcatggccacgcagcggacggtgtcctcgccgatgtgctgttcgacctcgacaacgatgtcgaccggcgagggcgaatcgaacccctcgctcgtgatccggatggcggaataaatttcaggaacggtctggcccttgaacaaaatatccacgacgggaccgatgacttggacgacgacgccggcgcggggcgcgggtgcgggttgattcatggcgttctccgttggattcaggacttgagcgcctccacggcggtcatgatttcgagaagctctttggtgatgcccgcctggcgggctttattcaggttgagggtcaggacctcgatcagctcctcggcgttgttggaagcggcatccatggccatcatccgggcagcctgctcggccgcctgggactcggcgtaggcatggacgatttgggattcgacatatcggggccagtaggcggcgatgagcggagatggaagaggctcccaatccgggacgacagccccgccctcctctccgcccccggaatcaacgggcaggatccggacgatggcgagccgcggggcgagaacggacttgaattcgttgtaggccgcgtagacggcgtccgtttccaggaagaggaatttttccatcaacccggcggccaaagacctcagctcccccgctccgatccgatccgtatgctcggcataagcccggtcgatgggataggggaggcgcttgaaaaactgggccgctttccgtccgatcagctcgagccggacacgggcttccggctccttgcttttgaggaattcgagggttttcgccaaaagattggagttgaaggcgccgcacagccccttgtccgaagtcatgacgaggacatcgatcgtccgttcctcccggacgtccaggaacgggtgggcgtccggcccggcccagcccgccagccgcccgacggaatcagggaaggagtgccaaagcggccggccttcagcgattgtccgggaggctttcttgtacttggccgtggcgaccgtcttcatcgccttcgtaacctgctgggagttgcggacgctccggatgcgccgccgcaggtcgatcaggttggccatcaggcggcctcctcgcggaagcgccggccgaattcctccaaggcggcggcgatcgcctcgtccaagtgcttgtcgagggcctttttatcggcgatcccggcgaaaatctccgggtgctcccgctcgatgaaggcatagagcttcttttcataatcgcggatcttgccgacggggatctcgtccaagtacccgcggttgccggcataaaggatgaccacctgcttttcgatcgggaggggctcgaactggctctgcttgagaatttccgtcagccggatcccccgatcgagctgggcctgggaaatgcggtcgagctccgtgccgaactgggcgaacgagaggagctcgcggtattgctggagatcgccgcggagcttgccggcgacctgtttcatggccttggtctgggcgtggcccccgacccgggagaccgagatgccgacgttgatcccgggccggatgccggaattgaaaagctcggcctcgaggtagatctggccgtcggtgatcgagatcacgttggtcgggatgtagccggagacgtcgcccgcctgggtttcgatgatcggaagggcggtcagcgacccgccgccgagatcgtcattcaacttggccgcccgctcgagcagccgcgaatggagatagaacacgtcgccgggataggcctcgcgtccgggcggccggcggaggagaagggagatctcgcggtaagccgcggcgtgcttggacaggtcgtcatagacgcagagggcgtggcggccgttgtcccggaaccactcgccgacggcgcatccgctgtagggagcgaggtattggagaggcgacggatcggaggcggcggccacgacgaccacggaatattccatcgccccgtgatcctccagggttttgatgaagtgggcgaccgtggaattcttctggccgacggcgacatagacgcagatgacgccggtgtccttctggttgagaatcgtgtccaggacgatggccgactttccggtctggcggtcgccgatgatcagctcgcgctggccgcggccgatcgggatcatggagtcgatcgccttgatcccggtctggagcggctcccgaaccgggagccggtcgaccacgcccggagcaaggcgttcgacgggcatgaagacgtcgcttttgatcggccccttgccgtcaagcggccggccgagagggtcgatgacccggccgatcaggggcgggccggcgggcacggagatgatccggtgggtccgccggacgaggtcgccctcgacgatcatggagctttcgctgaggaggacgacgccgacgctgtcctcctcgaggttcagggcgaggccgaggacgtcgtgagggaattccagaagctcgttgtacatgacccggtccaagccgtggacccgggcgatgccgtcgcccacggtgatgacggtcccgacttcgcggatgtcgaccgactcctcgaagccctcgatctgacgctggatgatcttgctgatttcgtccgctttaatggccatggggctcccttccgccgatgatgtctttaagccgctggagctcgccccgcaacgaggcgtcataaacccggtttcccttgcggatgaacaagccgccgatgagagccgggtcgagtccataggaacaggagaccggggcctgctccaggcgggcgagctccgcctccagccggctcttttgtttctcggacaacagcacgaccgaccggacgtcgaacgtccggattccccggagctccttccacttggccggcaggttacggatgatctcgggcaggaggtcaagccgccgctgccggacgagaaggagaagaaaccgcttcgacttgtcgtgataatcgacccgggcgaggatttccttgatgacggccgctttctttgtgggacgcaggaacggacggctcagcagggcgaacagccgctcgtggcccttcacgagcccgaggaaatcctccaagtccttcgacacaacccggtactcggattcatccgggagagctccggccaagccctccgtataccgtttaatgagcagcggattcatcggacatcaccttcagccggtcgatggaccggtcgatcaagtcgatgtgatcggcttcggtcagccgttttttgagccgttcctcggccaggccggcggccagctcggtcgtgtattccttgagctcgcggatgccggcctgaagccggacggccacttcctgggcggccagcgtccggatccgctccgcttcccgcgaggcgatatcccggatccgctccgtctcggcccgggcctcggccgcggcccgttccttcagccgggcggcctcgtcttggagctcggcgaccctggttgcggcctcggtcagcttggcttccgcctcctcccgctcgcgccgggcgtcggccagcaggtcgcggaccgtttcggccttcttgtccagcatcgcctggaggggcttccgcagaaaatagaacaacgccccgaacaggacggcgaagttgatgactttccagagaaaatccaatccgccgccgccggccgcgtgctccgcctccccggcggcgaaaccggccgccggaaaggagaccagcaggagaacggcgagggcacgagagacattcatgaccgatgcagcagcttttcctcgattttttccgaaagggggacggcctcggcccgcagttcctctttcagccgggcgacctcggcctcgaacgcggcccgggcgttttcgatctcggtcttggccgcttgtcccgcttccgtgatcaaccggttcttttcccgcagcgcctcgagctcgacccgatctcgcgtttcctcggcctccaagcgggccgccttgagcccggcatcgaccgccttcaaccggcgggccgtctcgtccaggttcgactgggcggcggccatgtcgtcttggaggcgtttttcccgcgcgtccatcaccccccggagcggcttgaaaaaaacccggttcaggacgacaacaagaatccagaccaggacaaaggtgacaatgacactcgcgtcgatctcaagcatgaaaggccgttccgttcggttatcggaaatccgagtttatcatatcgattcgttaaaaatccaattccgggcgggaacggaggctcagcgcgaacggaggatttttttgacttccccgaccaaaaaaagactccccgcaacgaagaccgtcccgcccgggccggccaggcggcgggcctgggccagggcctttcccaggtcgggttcaagaacggttttcgaagcaaacgccggcgccttggccaggatttcctccggcgaggccgcccgcttgtaggggatcgtcgtcaggatgatccggcggacggcggggaagaggatccgggcgatccggccgaccgccttgtctttcatgaccgcgaaaaccaaaacgggccggcgggacgccgccgacttgatgaacgcggccacggcctcggccccggcttcgttgtgggccccgtccaggaagacgcgcggcctcgttccggcccgctcgagccggccttcccagcgggtgtcccggattccctcctcgatttcccggattccaaccggagaccagaccttgtccaggacgcgggcggcggccgcggccacggccgcattgcggccctggtgttccccggtcagggaaggcgcgaggcggaagacgttcccgcccgcccggtagaggaaccttcctccgccgcggaaccgcgactcgaacgaggcgccgcggccgaagacctcgatcaagggggctttctcctcctccgcccggcgccggatcacggccagggccgggccgggggcgacgccgctgaccacgggaacgccgggcttgatgatcccggccttttcgaaggcgattttcgccagggtgtttcccaggtattccatgtggtcccgggacacggtagtgatgatcgagacgagaggccggacgacgttggtcgcgtcgaaccgcccgcccatcccgacctctaaaaccgcgccgtcgacgcgcttctcccggaaatggagcaaggccgcggccgtcaggacctcaaaataagtcggcgagacgtcgaggattcgggccgcccggagctcctggatttttgcccggatgaccgcgatccggagacggaagtccccttcggaaaccggccggccgttgattcggatccgctcctcgacccggacaaggtggggggatgtgtacagaccgatccggcggccggaccgggccaggatcgcagccagcatggccgcgaccgatccctttccgttggttccggcaacgtgaatcaggggatatgcctcgtgaggatcgcccagccccctcagcagggcccgcatgttgtccaggccgagcttgatgccgaaccgctccaagtcggctaaatacgcccggcaggcggccggagagaagcccttcccggaaggcgcggcggaccgcggcgtgttcacgcggatttgttgaggaaaagacggagagcgcggaccaggtacgctttaaggtttttccgcggaacgacgtcgtcgatcatgccgtggctgaggagaaactcggatcgctggaagcccttcggcagcttctccttgatggtctgctcgatgacgcgggggccggcgaaaccgataagggcgttgggctcggcgatgttcagatcgcccagcatggcgaagctggccgtgaccccgcccgtcgtgggatcggccaggacggagatgaacggcaggccggcttgttccaggcggccgagggccgcgcacgtcttggccatctgcatgaggctgagggcgccttcctgcatccgcgctccgcccgagcacgagatgatgatgaaaggaattttttcagccatcgccctctcggcggcccgggtgatcttttccccgacgaccgagcccatgcttccccccatgaaggcgaagtccagggcggagatcgccgtccgaatgcccccgatcatccccagcccgttgaccacggcctcgggcagggaagtcttccgctggttgtccgccaggcgcttgtgatagggctggctgtcgacgaaatgcaggggatcccggggttggatgtcgtggtcggtgatgtcgaaccgggcgtcgtcgtacagcaaggccagccattccgaggcggaaagccggaaatggaacgcgcaggccggacagacggacaggttatccaggatatcctccttgtaaaggatacgctggcaattgttgcatcgtgtccacaagttggtcatgacggttcaagagtctaacagcaagcccgaacaggtgtcaacctcgggccggcggcgccgggggggcggccttgagacgatcggaaagcaaacggatgacctcggccgccgtcgggaggtccactccgaagtccgacttttccctgagcaggtcgagagcggtctggagaaggtgctcgccgtcgaagggcttttcgaagtacgcggccgctccgaacgaggttaaggcctcctgcttgtactgcggcccccggtagagaccggtgacgatgatcaccgatgtccggcccttggattcctgggtgatccgcttggtcaggtcgaagccatggagcttggggaggatggcttcaaggatcaccaggtcgggattctcgattttgaaggaatcataagccgccgccccgtcggaggcctggaaaatctgaaaacggtacggctcgaacagggcggccacggcgtcccggttcttcgtgtcgtaatcgaccaggaggattttcttatcggccatcggaaataaggccctccgcgccgggagaatcttattatgaccgaacggcggcggaaattcaattcccggccgaattgtgctatagttgccccgtttccatggccaaaggcatcgatctctccatcatcgtccccgttttcaacgaggaaaagaaccttcgccctcttcacgccgaaatcaaggccgccggcgataagctcggccggacctatgaaatcatcctggtcgacgacggcagccgggacggttcctgggacgtcctccggtccatccaggcctccgacgtccgggttcgggcgatccggctccggaagaatttcggccagacggccgccctttcggccgggttcgacaatgcccggggccggatcatcgtcaccttggacgccgacttggaaaacgacccggccgacatcgggatgctcatcgacaagatcgaggagggatacgacctggtcagcggctggcgcaaggaccgttggaaaaaacatttcttcacccggcgcatcccctcgctcttggccaaccggttgatctcggccatcaccaaggtccgtctccgggatttcggctgcaccttgaaggccttccgccgcgaagtcatcgaaaacatccacctctacggggagatgcaccggttcatcgcggccatcgccgcctccgtcggcgtcgccatcgccgaggtcccggtgaacttccgcccccgcatccacggcaagtcgaaatacggcatctcccgctcgatccgggtgatgctcgacctcctgacggtgaaattcctcctcagctattcgacccggccgctgcagatattcggcctgatgggtctcatctccggcgcggccgggacggtcatcggactgattctctcctaccagcggctcgtcctgaaaacagccatcggcaaccggccgcttctcctgctggccgtcctgctcctggtcgtcgggttccagttcgtgaccatgggcctcctgggcgaaatcatggtccgaacctaccacgaggcggtcgaaaaacatatctacgtcatccgcgaggtcatcgaaaccccaccgaccaaggccgagtgagcccgtggcgatgaagatcctgatgctcgccccggagccgttcttccagccccggggaacgcccatcagcgtctatttccgtctgaaagccctgtccgatctgggccattccgtcgatctggtcacctacccgcgcggcggagacgtggcctttcccggcctggccatcaagcgcgtccccaacctgatcggcgtccgcgatatcaagatcggcccctcgctggtcaagcttcccctggacgccctgatgttcgcgacggccttcgggtcgctcctccgaaagcgctacgatctcatcttctcccacgaggaagcggccctcctcggcgtcctgctcgggaagatcttccgcactccgcatctctacgacatgcactccagcctcccccagcagctcgaaaacttcgatttttcccggagcgccctcctgaagacagccttcctccggatggagcgcttcatcctcaagggatcgcgctccgtgatcgtcatctgccgagacctgctcgactatgccgcccggctgggattcggcggcaaggccgtttttctcgaaaacatcctggacttcaacgatttcgatccggcgccgcccggtccggcggaaatcgccgccgtccggcgggatatcgccggcgacggtgaaaaaatcgttctctacgcgggcaatttcgagccctatcagggcgtgtctctgctcgttgaagccttcggccggatgaaggagcgagccgttcttttaatcgtcggcgggtcgaaggccgaccacgaaccggcccggaagcgggcggccgagctgggcttcgccgaccggttcgtcctcgtggaaaaagtgccgccccagcgcgtgcccgtctatatcagtctgagcgacgtcctcgtctcaccccgcgtctcggggaccaacacgccgctgaaaatttacgcctatctcaaagcgggcaagcccgtcgtggccaccgacctgtggacaaacagccaggttttgacggaggagatcgccgtcctggcgccgcccgatcccgaaaaattcgccgccgccctggacttcgccctgacatccgcggaggcggagcgccgggcccgggccggggcggacctggccgcccgggagtacacgtacccgcgctacaaggaaaagatcaccgaggcggtcacgagggccgtccgtcgatgaacgccttcgtcaccgggggaacgggtttcgtcggaaatcatctctgtgcggccctcgcggcctccggctggacggttaaagcgctcggccgcaggcttcggaacaaccctcccccgggcgtggagttcgtctccggcgacatccgcgacgccgccctcctggatcgggcttcggccggggccgacgttgtcttccacttggcctccgccctcggggccgcccggatcggggccgcggaattcatggccgtaaacgccggcgggacgcgggcggtgttggcggccgcccgggaaaacggcgtccgccgggtggttcacttcagctcggccggagtcctgggccatgtccggcccggcgaaaccgccgacgaaaaatatcccctcgatccccggaacgtctacgacaggaccaagctcgccggcgagcgcgccgccctggaagcggcctcggccggccaggacgtggtcgtcatccgtccgggctggatctacgggcccggcgaccgccggactttcaagctcatccgatcgatcgccgggggcaggtttctgctgcccggccggggcgaaaccctccaatctccggcgtatatcgacgacctggtggccggaacgcttctctgcgccggccgcggacgggcgggggaaatttataatatcgccggaaaccaggcgatgcccgtccggaagatggtcgagacgatcgccgccgccctcggaaagagcctgccgcgcttccatccccccatgggactgacccgggcggccggggcggtgctggggatcctgttcggcttcgccgggaaagaagctccgctcaattcctcgcgcctggcttttttcgtccaccccaagggcttgaacatcgacaaggcccggagggagctcggcttcgaaccggccgtcgggttcgccgaggggatggcccgggcggtggattggtatcgccgggccggctggctctgagggggtcctccccggttgtcatttaaagggatgaatatcagccggatatccgggccggaaaatatataggtgattcaaccggaataaaaacctggaatgcgcctcgagcgcgaatcccgcttcttcgcacatcctgatcaccgctttcttcgaaagcccgcccgtttctcccgtcttcatgccgccccgcttcttgtcttcgctgtaccaccaaattcgatggccgattcctcccaaaacgggaccgatcatggtgaggatcattttcccggacggccggaccaagcggcgcgccggccgccggatcggccgaaaaaatcaggtcggacgcattcgggggattccgccggagctccggctccgggaagatcgcgcggaggaaatcccggaaacgccgaaaggaaggtcccgggctgatcccccggcgatcaaacgaagtccggagtgaattgaccgcgcggatcggccttgcgggccttgaccagggcgtcgatgtcgatccccttgtcggcgaaatagtcctggatgacgtcccggacgacgccgttttgcttctcggtgacgtaatcgacggtcatggcctcgttctgctcgaccggttttccgaataagttgcgcttccagtggatgagccagcccgagaagcacatcggctgggaccgctttcccaggcctttgctcaccaggccggagagctttttgctctcatccatgctcaagtagtcgatatcgtagcccaactccttcaacttggcccggcgctcgtcccggtttccatattcgtacgtcggggtcatgaaatggacgccgtattcctgggcgaaccgcttcccgccgttgacgatgctgggataattctcggccgtcccggtcaggttggccggcgatgggatctgctcgcggtttgagccatcggcgaagccgacgaggtcgttttccagggcgaagagcaggcccccggtgttcatactcaagcggcagccgacgcacatgcgcgtctcggcgttgtacttgtcccggttcttgaaaaaagagctcatggcgatcttcttgatgatcggcttgtggtcgatgatctggtgggtgatcttgtcctcgccgaaggcggccttgaggcgctcgacattggggagattgttccggacgccgaattcgagatagcccttgtcgaatgtgatcaagtgaaccttttcgaattccttctgaaggaggacggccgccaggagggagtcgatccccccggagaacatcaccgcgacttcatttttaatcggacccatggcacactcctgtcatctcacgatctttatcatacacgggcggaagtgatttgggaatgagggaacggctcatcgccccttattccaaccgatcagggaggagactccggcggagcggatcaacccgtccgtctttcctcccggccggggattcctccgcccgggggcggggaatggcccgtccccggctttttagacggcgcacttgcgggagatcttggccgccgtctttttaacgcagcatccgccctgatggaagaacagccagcccaagaaaccgatgaccagggccagaaagcccagaacgcccaggaccacgatcaggaacgtcgacatgcgcctctcctttatatactattattttagtcgattctctcggaacagtcgtattctagagggcagcggccgggcttgtcaactgttttttactctccggccgccccgggatcggctgggcccccttccgcggctccgggagaaagacacgcctccgcaaaccgatttctggtatgattgggaatccccgacaggagatccgcatgcgccgcttcattcttccggccgcgggggcggcttttctactcatcccggccgccctctccgcccaagcctccctcccggtcgaaacgcttctcgatcgggtcgccgcccgcctcgaaagcttcaatccgaaatcaaactggcaggcctccatccgcagtacccagattgaacttgaccgcaaaggccggcccgagcggacgaccgtccagaccaaggccgtcgccgtgatcgaggggcggcgcgaagaggacattctaagcgtcgtccggacggaagacggcgtcacccgggacatcacggagaagtatctcgccgagcgccgggcccgctgggagaaataccgggcccaagaaacggcccgggagaggggaaaggagcccgcccgccgccgctcccggctggggatgcgggtggaggatttcgccgggcttctgcctttttcgcccgaacgccggacggaattctccttcgccgcccgggaaggggcggctccggacggacgtctgttgtatttcctcgacgtccgggccaaggtcaaggatgtcgagaactgggaaggaacctatacgatcgacgcctcaacgttcacgccgtttcacgcccggctcacgccatcggagacgccgcccttcgtcaaggagatcgaggtcgaggcggatttccaggtcttcgaggacgtccatatcattccccttcggacctgggtccggatcaacgccggattcctcttcctcaagcgcatccgggccgtctcggaggaagtgtacacggacatccgcgtcacccgctgagcgggaggatccggggacggcggccgggggaaggccgctaggcgggattccggtccgcgagcgtccgccggtcggccaggcgcagacgccggtcggccacggcgaacgtgtattcggggagcgaggcggcgatgagagccccggccccgatgacgctgcccttcccgatcgtcactccgtccaggacgatgactccggcgcccatccaggtgtcttctccgacccggatgccgcccttggccgacgaggcttggaacatgatcgggcgggacgtatcggcgacgggatgattgccgccggccacgagataacactccccggccagaaaacaataatcgccgagccggatctccgtctccgataacaggctgcagttggccgagacgttgcagtggtcccccagataaatggatccttccttgcaggtcaggatcgtgttgcggccgatcatggcgttggccccgatccggatcccctcgttggcctcgcccttggcgtccaggacggccccgtcgtcgatgaacgtgttgtccccgatttcaatcttgtgcggatggcggaggacgacgttccggccgaagacgacgccccggccgaccttccctaggatccaggggaaaaaggcccgtcggagaaccagccccagcgcgccggggatcgggacgatgaagagattgacgaactcgtatttcagcaaggccgccaaaccctttttcccgacgcacaagccggcgtacttgccggcgagcttccgcttgggatcgaggagctctttctgcgtgcttcccggagcccgttcgtccttcatgaacgcccctccttcggccggatatcgaggtaatcgatcatcagaacgcatccggccgggacctggacccgaacggagacggccgtctcccgggggacgaggaattcgacgtcggcttcccgccacccgtccgcgtcgggccggcgggcgtccccggaaaggaggatggtccgcaagggccggccctttcccggaaccagcaagatccgtccggccgtttcatccgcctggcccggggaggccttgtagcggaccgaagcccggtaggagccgggggccaggcggcggacgatcttcgtcgtcgattcgtccgccttggccgcgctcccgtcccaggaaacagccgcgaatcccgacaggccggagccggcgacgaccgccccgcggcggacggccagccattccccctcgcaggcccgccggccgcccgccgtcaattccgggtcgttccagacatagacctcgctcatgccgtcctggccgcggtatgcgagcttgtcggcattttcgacggagatgaagtcgtagagggccgcgttgatgtggtcggtccggaacagcgacggcgatgtcaccagccagatccgctgccccggatgggcttggataatccggcgaaggtcggccgcgctgttgatccagcgggctccgacataaaaatctttccaaccgtccttcgtcttctcccaggcgtcccaggtgcccgggccgcccgaccacagccagtaatccacccggccggcatagatcttctgaaaaacgacatggatggcgatgacgacatcgtctttccggagcttggccgcgacataccggccgacgctctcgtggtcgtaatgctcgaaccgtcccgaggaggtgatgatgtcggtcgtaatcggatccccgtagcggcggttgatcacggacgggagccgctccggacggacgccctcggtcaggacgaacagaagcccgatgaagagcatgaagctgaaaaccgtccgggtccgggctttttcgatcctgaacgccggggcggccaggccgtcgaccgccaggcggccggcggcccggagagccgccaggaacatcaggatgaaaagaggatagagctgggccaagtagcggggctggacatgcgtccggaaaaagccgaagaaaaacagggggaggatcaggcagatattgaagtaaagccagggcgaccggtccggccccggctctacggccggccgcgccctttttcttttccagacgacccggcggaggcagaggaacaacccggccagaacagtcaggctcatccgcggaaagctccggtaaaactgccggaaataatccaggttgaagcttccgaagaaatacgcgatcattccgccgaggctcatgtccgtcttctcatagacaaatccgactttccaaaagaaaaattcctggagctggatcgctaaatagaataagacgacggcggccagtcccgtcaggacgtcccggcggaagaagcgccggggaccgcgcatgaacaggagggcgggataagcgaagatcacccccatcccgagctggtggatgagcggcgcgaggagaaacaacacgacggccggcagcctgaattttttttcgtcggcgatgtatccccgataaaacaaatagagtccggcaagataacagagctggaggggggcgaaatagagggccagccgggcatattcccattcccaggcggagaaggccaggagaacggcggccgagacgcccaccgtccgggagaaaaaccgccggccggcgtgataggccagggccagcaggccggccgcgcacaaaacgctgaagacccgcatcgtcacggcgttgaggccgaagacaaaagcgcccgcggccaggacataggcataaagaatcgccttccaataaatatgacccgacggaaagagcggatagccgtgatcgagaatgccccgggcggccagatagtgaaagccctcgtccatccaaagagacagaatcccgagattccggagcatcacggccacccaggcggcgaggagaatgccaaaaacaagatggagaatcaggtcccgtcgatcccgacgggcgggaaccggccaggtttcggccatgcaggaccgtccctaggcggcgcgacccccgtcgtctcccgtccggtcgtcgatccggtcgaccgaataaatccggatccggtgggtctggaaataaatccgggaaacgacttcggccagcaatccgatcatgatgaaaaagatgcccaggatcatgaggaagacgctgaagataagattccccatgttttccttgatgttccagcttaggaaatagaatccaaccgtgatcaccgcggcgatcaaaaagccggccgagccgaagaccatcccaagaaggccgaagatctgcagcggacggtcgatgaagctgaccatgaacttcacggtgatgaggtcgaaaaaaacccgcttcacccgtgaaatcccgtaattggatttccccttgagccggttgatgttcgaaatcgggatctcggtgattttgaagccctcccggctgatgagggccgggatgaagcggtggagctctccgaacagccggatgctgctgatgacctcccgccggtaggccttgtacgtcgtgccgaagtcgtggattttgaccttgaccagccgtcccatcatccggttggccaccttggaggggaacttgcggaaaagggcgttgtccttgcggtccacccgccagccgctgacgatgtcatagcccttgtcgattttggccaggaactgggggatttcctccggagcatgctggaggtcgccgtccatggaaatgatgacgtcgccccggacatggtcaaatcccgcttgaaggccggccgtctggccgaagttgcggcggagcttgatgacccggacagccgggtcgcgctggtagatcgcccggagcatctcgtaggtccggtcccggcttccgtcgtcgacatagatgatctcgtaggtccggccggtctgttccaggacggctttcagccgccggtgcatttcctcgacgtttccttcctcgttatagaaagggacgacgatggaaacctggggatgttccggatcgctctttcggatgtcatattccattgaagttcaccaaggcgacgtttgaggcccgggcggccgcgggcaggcccgggtcgagcaaagcctggagctcgccctcccggaaggcgttgatgtaataacgcccgacctcggcctcgacggcgaacagctccgggttctggaatccggggtggaccccgatttccgccgttccttccccgacccggcggaaaatccggcggagccgggccgcgctcatccggccgctattacatataccataaaacgaatcggtgatcacgaatccggcggcccggacccggcgcctcatccgggcgcagcagagggaaagaaacgccgccttcagggattgagcgggatggcgggagaagccgtattcccggatgaaccggactctgcggaagccgtattcccgccccagacggagaacgatcttgaaaacagccgggacggcgtgcatgtgcttttcgctgtcgagatgggtcaggggaaggcccgtcgcccgggctttctcgatctgggcccggagctcccgctcgatctcggcgggacggatccggccggccgccagcttcaggagaatccgccccgcgccggccgggaaacggccgtcgggcccgacgagcgtcggaatttcctccggcggggaaagcggccggccgcggacgatgttcaggtgcacgccgacgcccagggcgggattctcccgggccagggcgaccgcctgctcgaatcccggcgtgttggtcatcagggtggcgctcgtcaggaccccccggcgatgggccagaatgatcccttcgttgaccggcgcgcacaggccgaaatcgtcggcgttgatgatgattttcttcatcccggattccgcccctcagggtacacttttgccgcttccggcgcaagaaattgtggtcttttggaacgaatccgtttaaaatgaacgccatgtgcggcatctgcggattcgtcgacggccggggactcgaccccggcgccccggaccttctcaagcggatgacccgcaccctgatccaccgcgggcccgacgacgagggcttccatatcgatggacaagccgccctggggatgcgccgcctgagcatcatcgacctcctcaccggtcaccagccgatggccaacgaggaccggacggtctgggtcgtgatgaacggggaaatctataatttccccgagatccgcaaggatctcctcgcccggggccacgtcctggccacgcagtccgacaccgaggtcgtcgttcatctttacgaggagcggggaacggatttcgtccacgccctcaacgggatgttcgccgtcgccctctgggacgcgaaaagccgccgcctcgtcctggcccgcgaccgcttgggagtcaaaccgctccattattgccggatcggatcgaggctctatttcgcctccgagatcaaggccctcctccaggccccgattccccgggacatcgacctcgagtccctggcccggttcttcactttcgagtacattccggccccgcgctcgatcttccgcgggatccggaaaatcctgcccggccgcctgctcgttttcgaggacgggaaggaaaccgagctttcctactgggacgtccgccacgccgaaacggcgattgtcccccgcccggcggccgaatacacggcggagatcatcgaccggctccgggaatccgtccggcgccggctcatctccgacgtccccctcggcgtctttctcagcggcggcatcgattccagcgccgtcaccgccctgatgagcgaggtcgccggggcggggatcaagacgtactccatcggcttccgggaaaaatcgttcgacgagctcgacgccgcccggatcgtggccgacacgttcgggacggatcaccgcgccttcgtcgtcaccccgaccgaagtcagcggcctcgttccgacgctggccggcttcctggacgagcccctggccgacgcctccatcatcccgacctacgtgatctccaagctggcccgagagtacgtcaccgtcgccctggccggggacggaggggacgagctgttcgccgggtacgacacgtacaaggcctacaaggcggcccgctggtaccggaaggtccccggcttcgcgagacgcggcctcatccggccggtcgtccgggcccttcccgcctcggcccgccggctgagcttcgaattcaaggccaaaaagtttgtgagcggcgcggaatacccgccggaaatcgcgaatttcatctggtggggggcctatccgcccgagctccggcggcggctgttcgctccccccgtcaacgccgccctggccgaggatccttacgccccggtcgccttccacgccgcgaacacccgggcggccgatccgctcgaccggatcgcctacctcgacttgaagctttacctccaggacgaccttctgccgaaagtcgaccggatgagcatggccgcctcgctcgagatccgggcgccgttcctcgattacacgttcgtcgagttcgccgccgcgattcccagctccctcaagctccggggcttccggtccaaggacatcctcaagaaagctttggccggccgcctcccggagtcgatcctgaacaagaaaaaaatcggttttgacatccccctcggcgtctggatgcggaacggcttgaagagcttcgttctcgagaccctcgcccccgaccgccttcgccggcatggttttttcgaccagggcttcgtcgattcgatattgaaggagcatttcgccggctcgcacaaccaccgccagctgctgtggacgctgatcatcttccagaactggtacgaccgctatggccgataaggatcaatcgtgactcctgtgtccgcctcgctccgccccgtccgcgtcacccgaagggccgtctacggcctctttcgcggcgccggtttcccgatgaagctctatccgcgccttaagttccgcatgtgtccgattctccggatcgaggcctacgtcccggacgggtgcgacattttagacctcggctgcgggaacggcttgttcacggccatcctgaagcttggttccccggaccggaagatcatcggaatcgatctcgacgcccggaaaatcacggccgcccggcggttcctggggaagcttcgcgacgtggatttccggctcggcaacgtcgtttccgccccttaccccaaaaccggcgcttgcacaatcatcgacgtcctctacctcctgccggtcgagactcagaacgcgatattaaagaagtgcgccggggccctgccctccgggggaacgctgatcctgaaggaaatggacctcgcgccccgctggaaatatgcttggaacgcggtccaggagacaatctccgtcaagatcgtcggcttcaccctcggctcgcggttccatttccggggccgggaggattatgccgccaccctcgccggcctgggattcgacgtggagatcatccccctccaccgtggctacgcctactcccacatcctctacgtcgcccggaaaaaatagggattcgggggacttcaagccaggccggcgatccttgaaaggaacggccggcggcccggatcggctgacttgcgacaaacccggcgatatggcataacatacggctgatggcaacctccctgctcgtcgagacgaattgcatctatttcaagggcgaaaaaccctgcgtttataagcggacatgcgaccactgcccccatttcaagcccttcgggcccaaaatcctggtcatcaagtgccgggcccaaggggacgttctccggacgacccccctcctgacgggcctgaagcggcagtatcccgaggcgttcatcacctggctggtggacgaggaaaccgtcgaccttctccgcggcatccccctgatcgaccgggtcgtccccttgaacgcggaaacccttctcgccctccgggcccagcggttcgacgcggtctattcattggacaaggatccgggcctgaccgccctggccgttctgctggacgcgccccgcaagctcggcttcggcctgaacgaacacggcaacctcacggccctcaccccggcggccgcctattccctccggctcggcgtcgacgacgacctcaagttccgggtcaatcgaatgacctaccaagaggccatcttcgaggcggccgagatcgagtaccaggccgacgattacgtcttcgttctggccgacgccccgcgtcaaaaagccgagcgctttttcctcgaccgcaaagtgccgaaaaagcggctcaacatcggcttgaacacgggcgccggggcgaagttcacgaccaaacaatggcccgaggaccatttcctggaactcatcccgaagctgaagcgggccctcaacgccaacatcttcctgctcggcggcccgcgcgagaaagccctcaaccagcggctggcccgccggagcaagctcaaggtcttcgacaccggcacggacaacaccctcctcgaattcgccggcttcctggccaagatggacgtcgtcgtctgctcggacacgctggccatgcacctggccttggccctgaaaaagaaaaccgtggccttgttcgggccgacctgcccggctgaaatcgagatgtacggacgcggtcccaagctcttcgccggggcggaatgcgccccctgctacaagcaggcctgtccccggcccgtctgcatgaaacgcctcacgccggacatggtgctccaggccgtccgggaggtcgccgtcccgtgagcgagccggcccgcaagccgcttttggcggtgatgctcccgacttacaacgagaaggagaacatcgccgacatggtcgaggcgatcctcgccctacccctggacgccgatgtccgggtcgtcgtggccgacgacgattccccggacggcaccggccgctgggccgaggagcgggcggcggccgatccccgcgtccacgccctcgtccggaagaagcgccgcggccgcggcgccggcggcatcgacgggctgaaggccgccctggccctcggcgcggatttcgtcgtcgagatggacgcggatttctcccacgccccgaaatacatcccggacctgctggccgcggccgcccaagccgacctcgtcctcgggtcccggtttgttccgggcggccgggatgccgaccgcggccttcatcgccgcttcatcacgttctgcgtcgggacgttcatccggcggctttacgggttgtcgatccgcgacgtctcctcgggctaccgtctgtaccggcgcgaggttctcgaagccgtggacctggacgacctgatctccgtcggccaatccgtcgtcctggaaatcctccgcaaaacctctctcctcggcttccggatcgccgaggcgccaatcgtcttcgtcgaccgggtccgcggccggacgaagctggattttctctcccttctcgaaaccctggtcatggccgtcaaattcaagaagcgctacacccgggagacggtgaaggccgcgcgttgaaaacccggcgccaggtcctcggccagcattttcttcgcgatctccggctgcttgataaaatcgcccggacgatcgatccccgccccggggatgtggtcatcgagatcggccccggcaagggggcgctcacccgggcgctatccccccttgtccgaatgatcgtggccgtcgagaaggaccgcatcctggccgaatccctgaacgcggagaagccgggaaacgtcgccgtcgtcgagggcgacgccctggaggtctccttcgagcgcctgatccgggaaatggccggagtttctccgccggtgaaaatcgccggcaacctgccgtactcgatctcgggtccgtttttagcccgcgtctgggaggagcggcggctgttttcccgggcctcctttcttctccagcgggaggtcgcggaacggatcgcggccgggccgggaacgaaggagttcgccccgctttcgatcatgctccagatttttttcgaggtgaaaatcctcttccgggtcgcccccggctcgtttagtccgccgcccaaggtcgattcggccgttgtctcgatgatccgccgggcggccccccttcacccggtcgccgacgaggcgggcttccggaaattcctcggcggcgctttcgcccagcgccggaaaaccttgctcaataatttcctggccatggggatccccccggataagggggaggccgccttggcctccctcggcctggccaagaccgtccgtcccgaacaagtccccattcccgcctggatatcgctggtttccctcgtccgttagcgggtgccccggtctgagccccgccgggaagacggcgcgggcggccggcgtccaatcaagctcgtccgcgggcctcaggcggcctccgtcgcgccgtccggcccttgcattccaggcgtcgcgggagtgtgatcaacggctctcttccccatcgcccggatgaggctttactcgatgccgccgccccctcctcccggggagaacattctcttcctttcctttgacttgcccttcggcggcgggcgatgggattccggtcgcggacttccgccccccgggggaatcggctacaatacgtcctcatgaagcgttttgactactaccgccgcctctggcggatctaccggtcgtacgccgggaaggaaacccgcctcgcccacatgcccatccgactgtggatcgaggcgaccagcacctgcggcttgtcctgcgtcatgtgcccgaacaaaagcctgccgcgcgagcagcggggattcatggatttcggcctgttcaagaaaatcatcgacgaggcgaagggctttgtcttcgacgtccacctcctccatcgcggggaatcgctcgcccatccggatttcttccggatgatccgctgcgcccatgacgccggcatcgtcacccgattccacaccaacggaaccctgctgaccgaggagaaatcccgcctccttctcgattccgggatcgaccagttcgcgttttccttcgacggattcacagccgaggcctacgagcggatccgggcgggagcgaagttcgagaagaccgtcggcaacatcgtccgcttcctcgagctcaagaaggagatgaagcggaaaaagcccgtcaccttcatcgagctcatccactttcccgacgtttttcagaaaaccgaccgggcggcgaaaaaagccttcctcgcccggttcaaaggcctcccgctggacaaagtccatgtcaaggagctgcacaattgggccggggagacgtccggcgggccggaccggtcgaagccctaccggccgtgcaccttcctatggcacgccctgatcatcttctgggacggttcggtcctgccctgcacccaggatttcttcggatcctacctcctcggcaacgtccgggattcgtcgctccgggagatttggaacaacgaccggatggtggccctccgggagaagctcatcgcccgaacgatcgacgacctgcccacctgctcgaagtgcgaccggctctggcggccgacgctcttggggatcccccgcgagtacctgggccggctgctcgccggcaagatgaactgaaggcgcgggctcagcgccaatccgggaagacgtcccggccgccgcttttgaacagcggaacgacgcgcttggacgcgggatcgatcaaagtcagctcccagacgccctccgtcgggtagtgctccgtccccgaggcgaagacgatccaccggccgtcgggcgaccaggccgggaaataatcgtaggtctccggccgctcggtcaagcgctcccggcctccgccgtcgggattcaccagccagatatcccccttgccgtcggccgtcgaggagacataggcgatccgcgagccgtccggagagaagcgcggccggcaggacttgcctccctcgctcagggcccggacttcgccggagcgcaggtcggccacgaaggcgtcccagccgatcgtccgcttcccggtaaaggccagcagcggctcggccggagaaaagtcgggcagggcggccgaaccgtcaaaatccggaagaaggggcgtgacggacccggaaacgagatcggccgtccatagccggtaggaccggccgacggcccgttttcgttggattgtataggcgatttttttcccgtcgggatgccagccctgctcgatcgcctcgccggggccgttcgtcacccggcggacattcgtcccgtcgtcgttcatcacatagatctggtaagatccgccgcggttggaggtgaaagcgatgaaacgcccgtcgggggaccagcgggggaactcgtcgctggccggatcgtccgtcagccgccgcaggcccgcccgcgtcaagagatagatgtcgttgtttccgcccaagtcggattgaaagacgatccggccgtcgaaatccgcaagcgggcggcgggcggaaagcccggcggcttgtccgtcggccgtcccgccggagacagcagcggagccgtcgcctccgccgcggcagccgagaaaagccaggacgatcattccggccgcaaggaaggctaggcttcgattatgattcatgcgcgtcatgatccccccgcgcgtgtccggcgttcaacgccggatcgtcgggacaaagacgccctgggaccgccggctcggcgtcttgccaagagcattcgaggccgcttcatccggcatcaggctttcgtgcccggccgcgtccaccgatttgacaaggtagacgtaccggccggcttccgtcaccccggtatcccgccagaaaaaggtcgttccgtcggtctcggcggccaattgataggcggcggcgtccgcctcaggcttcttccggaagacgcggtacttgacgatgggagcgatcgcctcgttggccgggttggcttgccattgaacgtcggtgacaacccggatttgaaacaggctttcgtcgacgaaggactcccaacggacgttcagcgggggttggagagccagaagggtgaacgttttcgtcaacgaggcctttttcccgaaattatcggtgaccgtcagcttgaggacgtaggttcccggacgggtgaaaacccgggagaacctctgtccctgggcgctccagccgtcgccgaagatccagtcgtagcgggtgatcatcccgtccggatcgtaggaggatccggcgtcgaagtcgatcttgaccgtgacgatcagggatggggacgacaccgtgaaggccggcaccggcgccttgttgatgacttcgagatttttcaccttcgtgttggtcgccccgagattgtccgtgacggtcagggagttcgtaaaagtccccggcgtttggaacgtgtgggcgaccgtccggccggatgccgtctgcccgtcgccgaggatccagtcgtacgcggcgatcgtcccgtcgggatcggtggacgcgccggcgtcgaaattcaccgtcagcggcgccgagccggtcgccggctggaaggagaaatcggccacgggcgggttgttgggcgtcggcgattcgccgctcgtcatgacgagggccatgatatcgccgttgccgtcccagacggccagggccgccccggcctggtcgagggcggcgtcgctgtacgtcgacatccgcgagtcgggaatggctgtcgggcctttccactggccgttatagaagtagttgtaataaatcgccaggccccgattccagccgccgatctgccaggtggcgactaaaacaccggatttctcgatcaaggaggggcagtgcaacgctccggggtaggagatcacctgccgggggccgaacccgttgcccgtccaagcgcaatgaatgacggtggagggctcccccgcgatgttttcgtagaggaagatgacctgcggcgccgttccgttgaggaactcgcagtccggatagatctggtcgcggttttcgcccgagacaacggccggggcggaccagccggcgccgaacgacgttccccggagaacataagccgcgttgtaataataggatcccttctgggaaaacacgaccatgacggagccgctgccgacggcgatatcggcgaacttcgaccgccggctcgaactgatccggcgggcggcttcccagttcccgttcacccgggaccgggaacggacgatcccgtcgtcgccccaccagacgatgtacagattgcccgcgccggaagcggcgattttagctccttccaacaaggccccttccccgatcgtcccggccgtgctccagttcccgccgcccgacagcgtccggagccggacgatcgtccgctcggtccagaccacgtggacgttgcccgagccgtcgcaggcgatcccggcgttgtcattcccctcgctggtcacccggcccgagccgctgagattctggggcgtggaccaggtcttcgcgcttttcgtgtacttagtgaaaaagaggtccccgccgccgctcggatagagctccgtccaaacgacgtagaagttgcccgcggcatccgcggtcgcccggggcgcccaggaaggccaggccggagaattggaaatattctccccggcaaaggccgaagaaacgaaaacaagggacgcggcgatcagtccaaggaccgggagcgcgcgtttcgtcattgtccccgcttattggaaataaccccaggtgctttccgtgcctccgtagcccagcgtgctaatggcgaaggagcgctttttcttcaggtcggtgaactcgaaagaagccgagagcgtctccggcgacagggtgaggaggcggacgtattcgccgtcgtcctctttcatataaatcgcgtacgcctcgatgtgctcggggacgttgtcgggattgaccgcccagaacaggttgaacgtgatcttcggattcgtccagacccggtccagggtgatcgtggccgacagattctggggcacgaggggattggttttcaggacgacgatctgtttcgtcacggtgtccgtgcggttgatgttgtcggtgatggtcaaggtcacgttgtaggtgccggccgtcaggaacgtatggctggtgttccggccggagcccgagccgccgtcgccgaacttccaatcataacggacttcctggccgtcggggccgacggctttgaccgcggtgaagtccaccggaagcggcggataacccgtcaccggcgagaaggtgaagctcgcctcgggcagcggaaccttattaatgggataaagagaccaggctttaatatccgcccccggagcgttaaaggacgacatcgtcgcggcgacgttgccgaagggatcggaggccaaaccggggactttcggcatcgaggctccgatcatctgggcaggcgaccaattcccgttgatgttatgcgaatacagcatcccgaggccgccgtcgcccgggccgcgctggcaggccacgtgaattttgttgttcttgtcgatgacaacgcgggcaaaatgtatgaacgagaagggaatggcgatttgaaccgaggatccgatctcgaggacgcggatttcggatccgttttccaaatgaggatcggtgacatcctgccaggccgcgacggccttgttgttcgatcctaccgcgatccaggggtgaccgccggcgccgccctcgccgggcaatccctcgcgcggataccaggtctgcgcgggcgtccggttggtatagaaattctcatagatgccgtcggcgcctttctcgatccagatggcatgagcggtcccgtccggaccgacggccagcgcgccttgtttgccgtatttctcattcagcttgacgatattttcccaaacgccgttgatcttggagcgggcatagactttccctccggcttcatcggagaaaaagacatggatgttcccgtctttgtccattacggcgcaaggttcatttccgccgtacccctggcaaacgacttcggtctctccccacgttttggaatggggatcccaaatccggagaaaagtcgaatccgtgtcgacgatgccccaactagcgataatatagcccctaggggaggctgagatgtgcggacggttggcccgcgtcgccgccgccgtcaaccgcagcggttcggaaaccgtgatcccatcgtaactgagaacccaaaccgcgccgccgctgtcgtcgttggtggttccgggagcccaaatcacccacagaacgccgtcggggccgaaggcgcattgagtccagcgcacgccttccggggcatggtacagcagtttttcattctgcagggtttggccgtattgaagcgtggcgaaaaggaagaaaaaacacgcgcttgcaatcaaggctctcttcatcgtcttcggctccttgtgccaggtatagcgatttatcatgccaaggaaacagatgcttgtcaacccgttatataaatatgttatagtcattgctatggaaaacgcgtttaaaacgtttctccggacattaggggtcgggctggcggggcttatgtcgattcttcccctgccgggcgcgtcctccccgcatagcaactctctgtataaagccgatccggcgttctcccgccctcttgggcttcccggcgagccggttcaatatctttttcgatccggggaaggatcctggcatatcgcttccgtcggaccgtcgggcgttccggaaacggcccttctccgtctggacgcgtcctatgaggatcttcaattgcgccgcgacgccgccggccgtctctggctggccggagaggagatgaccgccgacggaagcatcaccagggccggggttctggaaaatgaaaccttcggcggttcgcggaccttcggcgctccggaaggctggaacgacggagcggatctttttttccccgcggaagggggattgtgggccgtctggcatcacctgtctggaaaaaccgaggagattctggccgaggaggccgcttccggccggagatggagaatcacgccggagggagccgccgctttgtctccgccccggatcgcgcccgacggcctcggcggattttggattctatggaccgggcggatcgaagggacctacgtcgtcgccgccaggcgttggagcgggaattcgtggtccggggaaaagcgtcttttcgtaaacggcgaaaaaccctgtcttcagctcgacgccgccttgggccgggacggcgtccttcgggccgcctggtcggcctatgacggctcgcgctaccgcgtccacgccgccggactggccgacggcggatggacgaatatccccttgccggtcaaaaaaacggggaccggacaaagtccccgcttggtcgccctcgacgacggccggccggccgttctctgggccgacacggggatgaccggaacgcgtcttctcggcgcggtttgcgacggaagcggaatcccggccgggccgttcgtcgtgtccgggaaaatcccggggccgcggttcgaggcggccggaacagacaacggcctcttcgtgatccttcccggtccggagggaatccggacggaatgtcaccggacggccgcccttctcgcccgcccgttttccagcgtgggagaagcccgcgtcctcgaagagccttcgggcgtcgccggaccggaggtcagcgagtcgaaatacatcggtttcggcgacagcatcacctacggctacatcaactcgacggaagcccccgagctgggatacatcccccggctggacgacaagctcgacgaggttttcgggcccacggacgtcatcaacgaaggatacccgggggagctcacggcccatgggctcgtccggatcgaggctgtcctggccgcccgccaggcccggtacatcctcgtcatggaagggaccaacgacgtcaagctcttcaataacgccggcccggtcgaagtcatcctctataacctcaaggaaatctgcctgcgcagccgcgccttcggaaccatgccgattctgtccacggtctgtccgcgcaacgactggatctggaatttccccaagtatcggaatcggcacatcgccctggaagcggggatccgggccctggccccccagatcgttgtccccttcgtcgacatggaggctgttttcaacgccaacggcggggccgacgcgctgatctccgacggcgtccatccgaacatcgagggctacaagctcatgaccgaaacgtggtacgcggccatccgggccctgccgtttccgcccttgcatccccgccttctttccaaggaagggatgattttccaggagctccccgcgcccgaaaaccggttgcaaaaaggcttggaacatgctagggtaaccgtcgtccgtcaaatcggttacctgcttttctggcaggccaatccgaaaacggccgatgcctcctcgctccaggggtatcgcgtttatcggaagaagcacggcgaaagcgccgacgggtacgttcggatcggcgaagtctcgggcgtatgcgctttcctcgaccgcgacatcacggcggtggaaacatacgattacgtcatcaccgcggtcgcgatcaacggtgtggaaggcgctccttccgaaaccgtgagcaatgattgatcaacactggaggaacatgtgatgatgatccaccgtcgtgctccccgctcgctgcttctcgccggaatgctgttgtgggcctcgcgggccttgctgagccaaacgccggccgcggctctcaaggaaatgagcctttccaaggacggcgacaagctctccgtccaactcaagatcgaaggggcctacacggtcgaggcgtcctttctgcccgcccctccccgtttggttgtggacctgacgccgatgccccggatccagatcccatcctacacccagatcgacgacatcggcgtcctcgatgtccggaccgggcagttcacgccggaaacggtccgggtcgtcttcgacctgagtcaaaacgttccggcctatacgatcgtccagaatgtcgaagggctgaagatttcattctggtacgagggagaggttccgcctctcgaggcgcccgtccgggaagcggaagcgaagcccggcgtgaagccgacggcgcctgcggccgcgccggccgaaccggagatccccggccgttccaactttttcgtggccgcccggaccggattgtccctgttcctgggcggggacatggccgtggacaaaaatttcgacctgtacggtgaaaccggtaccctggacgaggcttattccttcagcgcgcgtcccgtcttcgagctgcagttcggaaaatacctgaaccgcatcaagctcggcctcggtgtgacggcctggtcgatcaaggaaccgggagcgttcacggcttccctcccccatccgtttctcgccgactccaaccggacggtgagcttccaggccgacgacatgaagtatccctcctggagcttttcggccttcgctctcttctccctcctggaaacggatacgatcggcctttcggccggcccgatgatcggcctgaccatggggaaaacgagcagcctgaacgatttcaatttcaccgagcgctctcccttcacctcggccgatatcgtcgtctccgacctcacgttcgtcgaggaaaagttcaccgaattcctgttcggcggccttctcggtctggagtaccggccgaccgaatcgctgagcatcctcttcgatttgcggttgaattacctgaaccccaagaacgtcaaccttaaccagcggatcaacctgctccacttccagcccgtcttggggatccagtacaacttctgacgccccttcgggcgaaggaggacggcatgcctttcggcggcgcgtggaagcggcgggcggccggacggattgcggccgcggtctcaatcctggcgctcctttgcggcttttcctcggccgcggccgcggacggtgccgcctggcaggggacggtcgaattttccctcggccggtacaacatcgccgacccgctcttcaacacgatttaccggccgggcgggtcgatcaccggtctcgggctgacggccaacctgatcccccgcctaggtttttcgctcgacgtcaaggtattgtcaaaaaacggttccctgtcccacagcaaggaaaagacgtcgtttgtcctcatcccggtgtctctcgggctccgggcctcctatccggtgtctttcctgattccgttcgccggcctcggcctcgattattacttctattttgaaaacaaccccatcgggaccgtcgtcgatcacgccaagggctggcatgccgccgccggtgtctacttccaattcggagagacgatccccatcctccctttcgctaagatcaagtacacgatggtcaaggcctcggccggaagccggaccatcgacctgggcggatgggaatacggcgccgggctggcaatcgccttttagccggaggaactggagagaccgaagaatgatcatgaatgcttccgccgcggttcccaaggtcctccttctccattgcccgggcgataagatctacatccatgacttgtactgcagttactcgtccaaggcggattattattggccgcctagcgatctcatcatcctttccggcgtcctgcgggaaacccggctcgaggtgattgacgcggtggccgaccgcctctccgaagaggcttgtctcgaacgcatccggcgttttgctccggacgtggttatcttcacgagcgggacggcgacgtggaaaaacgatttcgccttcaccgcccgggtcaaggaggaaaccggggcccgcctcgtcgccacgggttccatcttcctcttcgaggcggaacggttcctggccgccgctccccacgtcgacgcagcgatcttggatacgggcaccccggaaatcgtcgactacgtttgcgggaggaagcgggattactccgccctggccgtccggagggcggacggtctgtccgtcccggccccggcgcgtccggctcccgttttcactctccccgttccccgccacgatcttttcaacctccgggccaaccgcagtccgctggcccggcgccggccgttcgctctcgtcatcgcctcgatcggctgcccgttcggctgcgtgttttgcacagccggagccgtcgcctaccggtcgcggaaccttgacggagtcctcgacgagttggaggccctccgggacctcggcgtccgggaaatcatgttcaacgatccgaccttcaccgtctcgaagaagcggatcttggaattgtgcgccggaatggaaaatcgcggactccgcttttcctgggtctgcaacgctcatatcaccaccctggacgaagagctggccgcggccatgaagaaggccggctgccataccgtcatgatcggcgtggaaagcggccaggaggaaatcctggcggccacggacaagaagatcacccgggaaaaggcgatccgggcatttgccgtatgtaaaaaattccgcatccggacgctcgcctatttcatcgtcggcctgcctggcgagacgcccgattcggtcggccggacgatccgcttcgccaaggagctggatccggacttcgcctcgttcaccgtcttgactccggacgtcggctcccccttgcggcaggaaagcatcgccaaggggttgatcgatccggacgtcctgcttttcgacagcacctgtccgccggtcttcagctcgggctccctgtctctggaggaactctggcggctgcggcaaaaggccgtccggtccttttacctccggccggcctaccttctcaagcaactgggagcagtccggagcgtccgggattttttgtatctcctcgatcaggcccggaccatgtttttccgctgaatcccgggccggcccggcgattgacgtttccggaactcttccgctatattacgattcatcatgtccttctcctcgaaatcgtccgggacggcggtcttccttgttctcctcattctggccgccgcggtccggttttggggcatcggctggggccttccccacacgtaccacgcggacgaaaactacttcgcagcgaagtcgatgcgcttcttggagggggatctcaatcctcatttctttcatgtccccacgcttcacatgtacgccctggccgggatgtggaaggtttattacggaatcgaaaaagccgccggaaatgtccggaccatcgccgaattcgaggaaaccttcacccaattcccccaggttttctacttgatcgggcgcttcctctcggccctgatgggcgccgggacggttcttcttctttaccttctcgggaaaaggatgttcggaccgcgggccggagccttggccgcccttcttctcaccttcggcctggagcacgcccgcatgtcgcacgacatgctgcccgacgtccccatggtcttctttctcgttttgtcctatctcttcatctggaatatcgctgaaaaagggcggacgcgggattatctttgggccggagcggcggccggcctggcgatgaccacaaagtacgggggggtgctcctgttcatccccctgttcgctgctcacgcataccgcgtccgcgaaaccaagcggcccgcccgggaatacatcctcagcccgcgcctgatcggcgcgggcctcgtttttctggccgtgttcatcctcggcagcccttatgtcgttctcgatttcccgaagtttttcaaggattttcggtggcagagccgccatctgaccgaggaggggcatttcggggattccaccgcgcattccgcccttcttttctacctgcgccatggattcatcgagaatgtggggatcatctcccaattcctcgtcctcggcggattcctcctcggcttgttccgccgtcaaaagagggacgtgatcctgctatcctatcctttggtccagttcgccctgatctcgctctggggggcgcgggcgacgcgatacctgatgcccctggccccgtttttctgcctgatcgggggagtcttcctggcttggcttttggaccggagccggaggaaatgggtggccgaaggagcggaccggaagcggcggaccgccttcaccgccgtctcttggctcctggtcgcggcgatcattgctccctcggccgtccgccttgcgaagctggactcggccttggccggcctcgattcccggacacgggccaagcaatggatcgaatacaaccttcccaagggcacggtcatcgcccttgaatcctacggccccccgatttcacggcaggactacaccgtctattacaaccataccttcagccggacggacctggaatttctctccttcaagggagtcgaatacgccgtcgtcagcgatatgatggccggacgcttcacccggttcccccaggacttccccagggaagccgcggtttacgaggagttggcccgggagggcaccctggtgaagacgatcgagcctggattcaaggagcccttgtttgaaatccacatgccgaaacttgaaatctacaagctcagccgggctcccgcccagggcttcccggtcaattttcggacctatgtccaggacgtttcgctaagccgcgcgccgtcgggttcctgggagatccggagcgcggtttcggccggaggcggcctgggcgtcaaggaggacgtctcgaatccctacgtgaaaatctcggactccggcggccgggaattggcccgcctcatcctccgccccggccggcttccctcggccgagccgtgggccgccgaagcgtcggaaaccgtcgccgacattcccgagggggcggtcatcgacttcgggtacgaatatcttccggctccgcggacgacgtcctatacgtccgaggaatccctgcgcaaggaataccgcttgccgggggtgatggacgcggcggggcggaaagccgggcgttggtccggacgagtctggttcgcagccgtccccggccccgggggctatcatttccagaccgtcgcggccgtcttcagggaggacggggttttcgtccggagccgcgttttcggtccggcccttcgatacggcaacggccggatcgatcatccttatgtcctcttcaccgacgcggagggaagcgaagcgaagaaaatcacggttttctccggccgcctcggcgcgttcggctccgacgggcggggaccggccgagacctcgattcttcttcccggcctccctccccgtttccggctgttcatcggccatgaagacggagccgcccggccgaactccgatatcccgaccggtccgtaccgcctcgagctgccgccgctccccggcccccccgggccggaatcccaaatatgatataattccggcaggagcatgagtaaggcgaggcggcggaagacgaacactcaaaccgcgtcaaaagcggccccccggcggcggtttcccctttccgaggccgtcggcatattgctcgtcttcgccgctcttttttccctggccgccctgatcagctataattccctcgacccgtcttgggccagcgccgcgcccgggaacgcccgcatcgacaactgggggggaaggatcggggcggagacggccgaaacggcatatgccgccctcggcctggccgcctggctcctccccttggccgccggatacctgggcatccgggccattcttcacggcaaccggagaatcatcttcggcaaagccgggcagtttattctcctgcttctcatcctctgtccccttttggatcttttctttcaaaacatcgcttggggcggaaagaaaatcccggtcggcggcgttctcggccagcttctggtctccttcctccacggttttttcggcagtccgggaactttgatcttcctcctggcggcggcttcgcttttcgccgtcgccgtcggcggtttttccttcaagaaattgtttctgggcgtcggccggatgacccggttcaccgtcgccggagtaaagatccgcatcccccgccgccccaagccggaaaagccggcccgggaaaagaaggcttcggcccgggccaaagcggagccggccgccgccccggctccggcccgggcggagcgccgcgagccgtctcctcctccgcggcgcgagctgcgcaaggcggcgatcaaaccgccgcttcctcccgtcgcccggcccgagcagtatgcgttcccccagttcgacgaccggcccgactacaccctcccgccgctgacgctcctggatcccggcgctccgaccgagcagatcgacagaaaggagcttcaggaaaaacgaagcctgatcgaggagaagctggccgagttcaaggtcgagggcgaagtgcgggaataccatcccggcccggttatcacgacctacgagtactctccgaagccgggaatcaagatcaaccaggtcacgaatctctccgacgacctggccctggccctcggggccgaatccgtccgcatccagcggattccgggcaagtcctccctgggcgtggaaatccccaacaacaagcgggagatcatcaagctccgcgatatcctcgagtcggaagcgttcatcaaatcgccgtccaagctgacccttgccttgggcaagaccgtccatgatgaagtctacgtgacggacctcggagtcatgccgcacctgctggtcgccggggcgaccggaaccgggaaaagcgtttgtctcaacgccttgatcgccagcatcctctataaggcctcgcccgaggaggtcaagctcctgctcatcgatcccaagcggctggagttttccctttatgacggaatcccccatcttctcagcccggtcatcaacgacgccaagaaagccgcggccatcctgatggacacggtcaaaaagatggaggagcgctattacctgatgcagcaggccaaggtccgcaacatcgaccagtacaaccatcacatcgccgaccagctccgggaaaaaagaggcaagttgaccgaggaggagcagcggaagctccggcccatgccctacatcgtcatcatcatcgacgagctggccgatctcatcatggtcagcggtcaggacgtcgacttcgccatcggccggctggcccagttggcccgggcggtcggcatccacctggtcctggccacccagcgtccctcgaccgacatcatcaccgggacgatcaagaacaacttccccagccggatcgctttccgcgtccccagcaagatcgactcccgggtcatcctggacgaaaacggggcggaaaagctcctggggatgggcgacatgcttttcatccccccgaattatccccggctcgtccgcctccactgctcctatgtctcgattccggaagtccgccggctggtcaacttcgtgaaaaagcaggggacgccggactacgacgagcgcatcgtcgacgtcctccagcgcaccggggagatgccttggggcgaatcggacgaaaaggacgaaatgttcgaggaggcggtcaagctgattctccacaccggacaggcctcggcttcttatctccagcggaggctcaagctcggctatgcccgggcctcccgcctgatcgaccagatggagcaggagggcattctcgggccgtcggaaggcagcaaaccccgggagatcctggtcgacgtgaaaagctatatgctgaactcggcgaaaaaaaatccggccggtgattaggcgatcgtgaagcccccgcccaaggccgaggtcgacctggaagccgtcgtcgcgaaataccggccggtcgtcggcttcaagatccgccgggccgtcggctgggataacccggactgggaggacctgaccaacgaggttctcacgcaaacgatcgcggccgttcgggccggggaattccgcggggattcccaaatcggcacgttcatctacaccatcgcctgccggcggatcgtcgaccacatccgggggaaatcgaaaatcgcccgccgattcccggtggaaaacgacccggcctcctcccaggaccggttggaggaacacgagcggatccgcggcctggccgcggccgtctcggccctgccgccgaaataccgcgaggtcctggatctctactactatcaagagctgagccgggaggaaaccgccctccgcctcgggctcgccccggcccgggtcagcgaacgcgtccactacgccctcaagctccttcggaaccagatgcagcgggcggcaaagtcattttttcccccgtcgcccgactaatgaaaggacaaggattcgatccgatgcgccgccccgaacacctcgaattcgaacgacagatcgacgactatcttctgggccggctgagcgcggaggaagccgagtgtttcgagaagcactatttcgactgcccggcctgttttcagcggacggccgagcgggccgctcttctcgaggccgtccggctggccgggccggcttccgcggcggccgtccggtcggcgaaaaaacgggctcgcctcaggttcggtctcgcctgggcggcggccgggacggccgtcctcttggccgcggccgttttcctcctggttccccgaacgccccgcccgccggattttccggacagcgggacgcggatcgtccgcggcgctcccgtcgttctcatcgcccccgcggggattctcgaggaaaatccgaaatctttctcctggcgcggcgtcgacggggcggcggaatacaggattacggtcgaggggctcgagcctgtctggacggcggaaacggacaaaccgtcggtcgtgatcccggcggaaatcgccccccgcttcctcccgggaaaaacctactcctggacggtgaaggcttacacggccgaggggacgcttctggccgtctcgccggcggcggctttctcgatcggccgctgaccgcgggccggcggctcaatcctcgttcggaatatcctcgtcgtagtacatccggccccggctctcctcctcgaaggccaggcagcacatcagccggccgcacaatcccgagatcttcgtcggattgatggcgatctgctgtttgcgggctttctggatcgtcaccggctcgaacgttttcatgaacgaggcgcagcagagcggacggccgcagacgccgaggccgccgatcatcttggcctcgtcgcggacgccgacctggcgcatctcgatccgcatccggagctctttggccaggtccttgaccagctggcggaaatcgatccggccgtcggccgtgtagaagaacacgccttttttctcgctgaaatagaaccggaccgcggtcagcttcatggccagattccggaacttgatccggtcgaggcagaaagcgaaggcccgttgctcgcgttcccggagccaggccagcctccgctcatcctcggcgtcggccttgcggaggacgttcggcgcttccgaagcccggttcggatggcggcataccggcccgtccgtctcgacgacccgggccaggtcgcccccgaactcggattccacgaggcagagatcgccccggaccaactcggtctcgcccttgcgggcccggatcgtctttcccgtcgtcaaggaaaccgcgcaaatcaaatcgctcatgtcgttatcctgtcattctcgcgaaaagaacgctcgcaagcaagcggacgttcgcgtatttttccaaagagacctgggccgcgtcgacggcccggatcagccgcaaggcccgttccggcgggacgaccgaggcaagctccccaaggcgctcttcaaggtcgggattgaataaagggcctcctcccgccgtttcgcccaggacgagaagatcccgtccgaatccgcggaagaaaccgagcaaggtctcgatgtcctcccgggaggcggcttttcgtccgccggcatgccggcggatgaaatccccgccgtcgcttccggtcaaaatcgcccggaacatgtcccacgcccggccgcgctcctcgaagaactcgtcccagtcggtgttcagggcccgctgataatcgccccggacgacggccgcgacggagacggcccgcgtttcatccaagccgcgcgcccggaggacggcgatgatctccttggttccgaccggtccgaagacaagcgtctggcaacgggaccgaatcgtcgggagaagaacgtccggattgcccgccaccaggatgaactgggagaacgccggcggctcctcgagaatcttcagcgaggcgttggccgccgcggcttccatttccgaagcgtcgtcgacgagaaacacccgcttgcggccgatcatcggcttcatgagggccagctcgatcgcccggcgcatttgatcgatgacgatgttccggggcttcgagccggatcccgccggttccgcgacggcgtcttccgcggcgtcctcatcccccgcggccgctccgttttcacggcctccgtcggccgccgtttttttctgtttccgcggaaggttgatcacctcgatgatgtcgggatggtttccggcggcgatcgaccggcaggagggacactcgccgcaggcgtcatcgtcgagatggaggcaattgaacgccttggccagctccaaggcggtttcccgctggccggcgccggcggccccgcagaacaacaggctcgggagggcgcttttccgccgcagggcggagcggagaatcgccttgagcggggcgttgccggggatatcgtcgaaagccatgatccgcctaatttgtcccggttcgtccgggggccgaaagggcggaccggagaaacgcggccgtgggcgtgtcggccgcggcgacgtcctcgggggatccggccgcgacgacgcgccctccgtcctccccgccctcgggacccaggtcgataatataatcgcagaaccggatcacttcaaggttgtgctcgatgacgaccacggtgttgcccatccggacaagctcggagaggatctccaaaagcttgcggacgtcgtcgaaatggagtccggtcgtcggctcgtccaaaaggtacagcgttcggccggtcgcccgccggcccagctccttggtcagcttgatgcgctgggcttcgccgccggacagcgtcggggccggctggccgagccggatgtagccgagcccgacctgccgcaaggtcgccagccggcgcttgaggcgcggctgggccttgaggtactcgtacgcctcatccaccgtcatggccaggaaatcggcgatcgaccgccccttgtaccggacggccagcgtttccttgttgtagcgaagtccgccgcagcggtcgcaggtgacgaaaacgtcaggaaggaaatgcatctcgacccgtttcaccccggccccctggcagtcctcgcagcggccgcccggaatgttgaagctgaaccgccccggcccgaagccgcgggtccgggcctcctgggacaaggagaagaggagccggaggtcggtgaacaggccggcgtacgtggccgggttggaccgcggcgtccggccgatcggtttctggtccacggagatgaccttgtccaggtgctggacgccctcgagcttgtcgaacgccccggttctgagcttcgcccggaacagggcgttctgcagggcgcggtggaggatgtcgaagaccagggtgcttttgcccgaacccgaaacgccggtcacggcggtcatgcatcccagggggatggagacatcgatgttcttgaggttgtgctcccgggcgttgcggatcgtcaggaagcttttagccggccggcgcccgtcggggaaggaaaccgccgcctccccccgcaggtacttggccgtcaaggagtccggggatttcagaatttccgggagcgttccttcggccacgaccgcgcccccttgctcgccggcgcccgggccgaggtcgaggatgtagtcggccgcccggatggtctgttcgtcgtgctcgacgacgaggacggtgttgccgtcgtcccggagccggcggatcatgccgatcaaccggccgttgtccctctggtggaggccgatcgtcggctcgtcgagaacgtagaggattccccggagccgggctccgacctgggccgccaggcggacgcgctgggcctctccgccggaaagcgaggccgccgtccggtcgagcgtcaggtaggacaagccgagctcgtgacagacgcgcaggcggccgaggagctcgcgccggatccgctcggccaccgcctcgcgggaaacgaggacctcgagtcggccgaggtcggcgatcagccggtcgatcgaaagcccgctcatgtcgtggatgttccgcccgtcgatccggacggccaggctccggggattgaggcgggctccttcgcaggaggggcagcggtccccggtcagctcggtctcgccgtcctcgttcagggtcgtgtcaaatccaaggccgtggcaccgcgggcaggcgccgtaggggctgttgaacgagaagttgcgcggttcgagatccggcaggctgacgtcgcagaccgggcagcggagcttccgggaataatagctttcggctccgtcctcggcgatgatcaggacctcgccgtccgtcaattccaacgcccgctcaaccgcctcctggagacggccgcgggaagaggcggacgggcgcaggtcgtcgatctggacttccccggtgtgtgaccgcgtttttaccaggatgatttcatcctcgagatcgcggaaaacgccgtccagccggagccggagataaccctttttccggaggcggtcaaagagccggtggtattcgcccttgcggcccttgatgacgggggccatgaccttgatccggccgcgggccgaatcgaggatgcggtcgatgatttggtcggtcgactgggagctcaccgcccgtccgcaggacgggcagtgggggatgccggcccgagcgaacagcagccggaggaggtcgtacatctcggtcacggttccgacggtcgagcgggggttggaggagattgtcttctgctcgatcgaaatggccggggacaggccctcgatggattcgacgtccggtttttccatcatctccatgtattggcgggcgtaagccgacatgcactcgatgtagcggcgctggccctcggcgaacagcgtgtcgaaggccaacgaggatttgcccgatccggacggcccggtgacgacgatgaaccggttgcggggaaggcggacgtcgatcctctttaaattgtgctgggccgccttcttcacgacgatttcgttgagcataaccttgtcattttaaggcttttcagcggccggagcaagaaaatttgacggccggccggccgatgcgctagcatgccgctatgggccgccaagagaatcttcacaaggcgctcgagattctccgggacgaatccctgaaaacgaattcgctgaccgccctgaagcatctgccggcgcaggaaggccggtacgccgattacccggccgaggtccaccccgccctggtaaaggctctccgggacaagggcttcgagcggctgtacgtccaccagcgggccagctgggaagcggtaaggaacggggggaatcccgtggtcgtcaccccgaccgcctcggggaaaaccctctgctacaacctgcccgtcctcgatgcgatcctcaaggatccctcggcccgggccctctacctcttcccgaccaaagccctggccaacgaccagcgggccgagctcgacgagacgatcgcccgcctgcccggggaaatccggatcttcacttacgacggcgacactccccaagacgcccggcgggccatccgggcccggggtcacatcgtcctgaccaatccggacatgctccacgccgggatcctgccccatcacaccaagtggatcaagctcttcgaaaacctgaaatacgtggtcatcgacgagctccataactaccggggcatcttcggcagccacctggccaacgtcctccgccggctcaagcgggtcgccgccttctacggggcgaatccccagttcatcctctgcacggccacgatcgccaacccgctggagatggccgagaaaatgatcgaggccccgccgacgctcatcgacgacaacggcgccccccgtggggaaaaatacgttctcttccacgttccgccggtggtcaatgcggccttgggcatccgccggtcctacgtcaacgaaagccgccgcatcgcctcgattttcctccatcagaacctccagacgatcgtcttcgcccagagccgtctcgtcaccgaggtccttctgacctatctcaaggaggatctggaaaaaaccatcaagcaggaaggcctgatccgcggttaccgcggcggctacctgccggtcaagcgccgggagatcgagaagggcctccgggagggaaagatcctcggcgtcgtctcgaccaacgccctcgagctcgggatcgacatcggcaccctcgacgtggccgtgctggcctcctacccgggaacgatcgcctcgacctggcagcggatcggccgggccggccggaaatccggagcctcagcggccgtgctgatcgcctcctccgccccgctcgaccagttcatcatccataaccccgactatttcttcggaaagtcggtcgagcgggccctcatcaatcccgacaacctgactatcctcatcaaccacctcgaatgcgccgccttcgagctcccgttccaggacggggagaagttcggccgggccgaaatcggcgaaatcctcaaatacctcgaggaggaaaagttcctccatcattccaaggacaagtggtactggacgtcggacgcgtacccggccgacggagtcagcctccggtcgatctcctccgacaacttcgtggtcgtcgacaccacggaaaagacgcgggtgatcgccgaggtggatttcacggcggccctgacgactctccacgagaaagcgatctatctctgcgagggcgagcagtacttcgtcgagaagctcgacttcaccgagcgcaaggcgtacgtcaagaagaccgacatcgactactataccgacgccatcgactacaccaagatcaagatcctggacgagttcgacaaaaaacgcctgaaacgcttcgacgtccgccacggcgaagtccacgtcgccacccaagtcgtcggttttaagaaaatcaagtttcacacccaggaaaacgtcggcgcgggcgatttgagcctcccccagaacgagatgggcacgacagcctggtgggcgacgatcccgggggatctcctggccggcctggcctacgaacccgaggaaaaaatcaacgggctctacggcttgtcctacatcctccacaacgtcgctccgctctttctcatgtgcgacatccacgacttgggcgtctcgatcggcgacaacgcgacgggcgaatcgatcccgaccagggacgtccgggccaaagttcagcagggggcgggcgtcctgtccctcgagccggacttcgagcccaatattttcctctacgataattatcccggcggcatcggcctgagcccgacgctgttcgatctcgacgagaagctcctcgactactgcctgaagacgatcgccgcctgcccctgcaagtccgggtgcccgtcctgcgtcggtccggtctatgaaagcggggaatcggccaaggagacggccctggcgattcttacaaagatgctggcctgaccgccgtcgcccgaaagaccggatccctggcggcctaaattgaatcggttccggccctgtgttatcctgaaccggaacgcccatgaacatcttcaagctcatcaccgatgcctcgatcgtcgttcaggcgatcctcctcattctcctctttttttccgtgttctcctggacgatcatcatattcaagcgcaagaccttccggacggccacggcccggtccaagaaattcctggagatctttaaaaaaagccggagcctgaccgaggtcaatgaggccgctaaatcctatccgggcagccccgcggccgccctgtttctggccggctacaaggagatcgcctacctggccaagcagcagcaggcggcgtccgagcccgcaaacggctcccgcctggaaaacctcagccgggccttgacgaaggcctccaacgccgaagtcgcccggatggaaaaaatgatgggatttttagccacgaccggaagcgtctcgcccttcatcggcctgttcggcacggtctggggcatcatggacaccttcatcgggatcggcgtcaccggatcgaccagcctggtctcggtggcccccggcatcgccgaggccctcatcgccacggccgtcggtttgttcgcggccattccggcggtcatggcctacaacatgttcctccaccagctcaaggaccagatcaccgacatggaggatttttccctcgagcttctcagcatcgcggaacggctctatggttctccctaagcttcccaccgtccgggccaagcgcgacgtcggcacggccctttccgagatcaacgtcacgccgttcgtcgacgtgatgctcgtcctgttggtcatcttcatggtcacggccccgatgatgcaaagcggcatcggggtcgatcttccgacggcggaaaccgacacggccccggccgaggagggcctgtccatcaccctccgtcccgaccagtccgtctatatcggggactcgatcatcaacatcaacctccttgaacgccagcttcaggccgctttctacgggaaaagcaagaaagtcgtctacctccgggcggacaagagcctccccttcggcttcgtcatggacgtcctggacatcgtcaagaaaacaggagtcgaggtggtcggcctcatgacccggccggaggagaagaaggccggccgaaaatgacctggagcgccgccggcagcgaccgggccttcaagcgggcccttatcatttcggccgccggccacgtcatcctgttttccttcatcattctcaatccctcccttcccaagaagccctcgcccaagggcgtcatccattacatttcgatggggatggtgggagggggcgggggcggacgaggaggaggcggcgacggacggctccccggcggcggaaacaaagccgcggggggaacgacggcggtcagccaaagcaagccggaatccctccgcgacctgaccgttccggagaaagtcgtccccaagaccgaatcacggcttcggtaccccgtcgacgacaagacgaagcgcaaagccgccgccgaaaagagggcctccatctccaagccgggtccgggagggaaggccggagcgtccgggtcggccgccgggacaggcgggggcggggaaggcggcaccggcctgaccatcggtcccggaggcgccggttcgggcggcgggttcggggagggattcggcgacggcctggccgaattcccttacgcctattacctcctccgcgtccgggatgaaatcacggtcaactggtttcccggcagcatcgatcccgggcccaacaacgttctccaaaccctcgtttatttccggatctaccgcaacggttcgatctccacgatcgaaatcaagcagtccagcggtctccgggccttcgacctgatcgccgtccgggcggtcgccaacgccgcccatttcccccctctccccgacgattacgacggggaatacttggggatcaatctcctcttcgagcatgcccgatgaaaaaaaacgtccttgtcacgatcatcctttttctgtccgcggccggcggggcctccgcccagcaggaattcaacatgcggatcaccgaaggaatgccggccgtggccttcgctctcccgccgttcgtcgccgccccggcggccaaggacgcggctgccgagattcactccgtcctcgaggccgacatccgctacacccggatcttcgagcttcttccgaagtcgtattacggatacatccggccgctgaccgacccgaacagtcccgagttcaaggattgggaatccatccaagccaacgttcttctcaccggccgggtggaagccgagccggagggagggatcatcttttcctgggttctgtacgacgtcaaatcgaagcgcacgatcatcgccccgcggcgttttcagtacaaggataaaaatctccgctacctggcccacgcgacggccgatgaaatcatgaaagcgtacggcgaaaagccgattttcacctcgaaaatcgcttttgtcagcaaccgggaccgcaacgaggaaatctatctcatggattacgacggggccaaccagacccgcctcatctacaaccaagtcaacgattccaatcccgcctgggacccgggaggcaagcgcttggcctacagctcctggcagaacctggttgtcggagtttatatcctcgacgtcttcgagaaagcccgggcccgcacgcctgtctccctcaaaggacagaattacaccccggcctggtcgccggacgggaaaaagctggccttttcctcctccatgaacggaaaccacgaaatctatgtcgccgatatcgagtccaaccccacgagggtcggacgcatcaagcagctgaccttcaatccggcggtggacatcgccccctcctggtcccccaacggccgggaaatcgtcttcacctcggaccgcagcggaacgacccagatctacatcatggacgccgagggcggcaacgtccgccggatctccttcggagccaaccatcacgacgcccccgcctggtcgcccaacggagacaagatcgtctatgtcgcccgggtggacaacgccttcgatctctacctgtacaacatccggtccgggcagatttccaagctgaccgaaatctacggccggaacgaatctccctcctggtcccccgacggccgccacatcctcttcacctccaacgtcagcggccggaaccaaatccacgcgatcgacgtcgacggccgcaatttccgcaagctgacgtccatgggggaaaacaagctcgccgactggtcaaactgatccggtcgtcctgatcatgaggcccaaggcctcgatttcccgttctctccgtggtacattggccgtaaagaagggaaaatctccatgggattcaagggggcgacggcctggacaaccgttctttcccgatcatcgccggagacctggttccgccggctgagcggcggcctggtttttttagctctcgtccaagttctcaccattgccctgagcctggctcatatcgtcatttcgcaggccgccgccctggtggttctggccgcggcggccgccggagcctggggtttcgaccggcttttccgccgattccctgaaacggggccgaacgagaccgccgccccgtctcccctggctccgatcctgcgcggagtcatcccgattctcctcgcccttctgggcttgaccgtcatcgtcgcttatttccatccttatctcttcggcgattgcctgatctaccatctgccggccgttcattactggagcgaaaaaggctttgtccactgggtcgccccgcaacctttgaagcccttcttcaccgatctcttcatcaacggctatcccaaggccgccgaattgatgggcttcgtcgtcgttcaggcgacggggatctccgggctggttcatctcctcaacgcctggtttctggcgatcggaatcagcggcacggcccttatcgcctcaagcctgggggcctcggcggaagcttcgctgaccgccggtctgctcttcgctctggcgccggtccatatccagcagttgaacgggacatatgtggattcggctttcgcctcggcggtggtcgctctcttcgccgttttgtcccgcctggccgccggcacgcgcggtcgattcgccgcttgggatgaagtcgccgttttcggcgccggcgccggcctggtcctcggcctcaagagctcgggaatccttccggcgggtgtggccggagcggccgcggtgatcgttctcggacttcgccggcggagattgccggccgaatcccggcgggcggcgaatcttcggacctgggcctgtattcccgttgttttcctcatctccgccctggtcggcggctattggtacgctcgaaacctcgcccacaccggaaatccggcttaccccctgacgctgaaaatcggtgaccccggtcgatccgccaaatcggttgattttatcttgaacaaggccgccaacactccccccgtgatcaggaactggccgggctggaagcaggtggcttatgtctggatgcagggcggcccggctcactggccgtattcggtctgcagcgccagcggtcgcttgggagggctcggccttctctggcttttgggatgcctcccggccgtcatcctcgcctgtttaaccgggaaaaaatccgggccgcctcccggcttgcgccgagcccggatcacgctcctcctctgcgcggccctggtttttcttttgacgccgatgcattggtgggctcggtatacggcgtggctgcttggaatcggtttgcccttcctcgtcctcgttctcgacaaattttgggaaagccgcggccggaaatggatcgcctcctgggcgatccttctggccgccgtttttctcgcggaaacggcggcgggaatcatgtggctggccggagccagcggaatcgactggtatgggggacagactgcttttcccgccgaacggaagatcggcttcgaccggctgacttggagccgccccttcatgacgatcgacgagacccgccgcggcgccgcgtatcgccgaatgaaaggcgatttcgagcccgttctcctcggacctttgaatcaacagagggttctctccccgccgatgacggccatgttcgggatggtctgcgatccgctgggccgacgccgggttttcgtgacggattttccacgccttcaaggcctgaggaaattacggcgtttccttagggaaaacaagatccgttacgcgatctgggacgcctccgccgcccaaatcccgcccttcgaccgattatgcctccgcaaggaaaacgacggaacataccggtatttcattttcgaggagccggaagacccggccgggaaaaaggaaacgatctctccccccttgtccgcggagacagtgaaaaccgcggagtgaggcccgcgcccgggacgggacgtcacgcggctccatttccgattgaaaacggcccggtaaatccggaggacgtccgcaacgcccgaagggaacccggctctccggcggaggggtggagacgtctttacacgatgaagcgggatctccctccggccgtctctccccgaaagaacgccgatttgcgcctcccgaaaagaccggtgaaatcgcccggacaggggaaaccgtcccttcctcattcgcggaccattcccaagaagcggattcacccgctgatccgccttatttccccgtaaattaatccattttattattcgcgcaaccggtgagacgatccgaattgacacaccgtcttaatccatgtatataggggattggcgggggacgatttcatcgtgccctcaacgatcacactgacaaaggaggactcaatgaaaaaaacaatcgttttggcccttgtctgtctccttgccatttccctaggcttgggagtttcctgcaaagcgaaaacaaaacccacccctccgcctcctccgcaggtcaaggaacagcccgtcgtggagcaagtgacggaaacggcgccggccgaagccgccccgctttcggaagaagagctcttcctgagaaagacgctcgatcagatcaaccaggagcgggccctgaagaacatccgtttcgattacgacaagtattttgtccgcgatgacgcgaaggggattctcgaagccaacgccgcttggatgaagaaattccaaacggcgaaaatcctgatcgagggccactgcgacgagcgcggcaccgaggaatacaacttggccctgggcgaaaaacgggccaagagcacgatggactacctgttgtctctcggcatcccggccgagcggatgaggatcatttcctacggcaagagccagccgctcgatatgggtcacgacgaaaccgcctgggcgaacaaccgccgggcccagttcctcgtcatcgaaaaataaccttaatgaagcgttcgtggcccgccgtcctgctgatggcgggcctttccctctccgccgcggcccaagaccgcagcaagaaggcctatgagctgatgtatgaagacattcagttgctcaagatccaaactcagcggatcgagaagaagatcgatcaagcgggcgcggatctgaaaggactcggcgatatcgtccgcgacttggccgcccaattcaaggatttccggattttccaagcccggaatcaagagggatggagcgaaatccccggccaggtgcggagcatccaggaacaactggcccagatcgaaaaccgccttcttcaactggccgccgatctcgagtccgccaaaactccggcgggggagacgacggccgctccggaggcggggggaaagcccaagcccgaggaaaaagccggaccggcccgaaagccggcggcggagccgccggccgcgaccgtccctccgtccggcctctccgcccaggaagcctatcaggcggcgatggctgatttcagcaaagggaacctcgacttggccgtggacggcttcgccctctatcgcgaacaattcggcgccagcccgttggccgacaacgccctctacatgatcggcgaatgccggttcagccagagaaaatttccagccgccatcgaggccttcgatgacttgatcctgacgtatcccatgagcgacaagatcgccgcggcttatctcaagaagggattcgccctggccgaaatgaaaaagaaaaccgaggccctcgccgtcctccgtctgcttctttcaaaatatcccctcgaggaggaagcccggcaggctcagcaaaaaatcaaggaactgcaggaagccccatgagagacgtcaacagcttgaacaaggtcatcctgatcggacggatcgggcagaggccggaattgcggcacttcccccaaagcgaccgggcgttggcccgtttcaccctggcgaccaacgaacgctcgttcaatccccaaaccagccaagcgtcgatccggaccgaatggcattccatcgtggcctgggcgaagctggccgaattctgcgaccgattcctggaagtcggcaaacagatcctggtcgagggcaagatccggacgcggtcctggcaggaccgcgacggcaacaagcgcaaaacaaccgaaatcgaggcgttcaacatcgtcctcctcggcccccgcgacgcccagccgcgcgggactgaaatcgatacgccctaccgggagccgggtccggacgccccctcgcccgattttccctccgatgaagagccgccggcttccctcggcgaggacgatgtccccttctgaggacgagcggaatttccgctcccggatcatcgaggatcaccgcccgtgggggaagttccgggcgtttccccatgaacaggccggaagcatcaagatcatcacggtcaacccgggaggctccctatccctccaatcccaccgccggagggcggagttctgggtggccctcgacgagggactcgaggtgacggtgggcgaccgggtgtggcggcccgcggccgacgaggaaatctacatcccgcgggaagcccggcaccgcgtccgcggcgtcgggcccgggcccgcccgaatcatggagatctggctgggcgattccgacgaaaacgatatcgtccgctacgaagacgtttacgggcgcaaataggcggaatcgacgaccggggtcgtcagcccggtgaacgccggaacgccgaagacgatgacataaatcccggccgccaggcctccgacgaccacgatccagcccaacacattgttgattttcgccatgacaaggaggatggcgtaatgcccgtggtgggacttgccctcctccttccgcgtgttgagcgcgatctcgcggacggccaagaggatctggccgaaggcgacgatcgaaaatccgatcacgaaagcccataggcaaacggccagcccgaccaaaagacggctgaattccatgacgtccctcctcctccgggggagccgccggcgacgcccccatttcctgccgccgcccgtcaggatgacgggctcgtcatcaagaacgcatcgggatacttaaagaggagcttttcgatgatgaattcctcgacttcctgggccgagcgcagattcatcgccttctgaaccacccgccggacaacccggacttccaccgcccgcagcgctttcttaatccgcgggatgaaaatcggattcatgctgaacgtccgcagaccgagaccgagaaggacgacggcggcgaggggatcggcggccatctctccgcagagggcgacgtcttttccctggcggtcggccgagacgatgacatgctttaaaagacgcaaggctgcggggtggagaggcttgtagaggtaggaaacgtattcgttggaccggtccacggccaggaaatactggagcaggtcgttggtcccgatgctgaagaagtccacttcccgggccagcagatcggcgatggccgccgcggccgggacttcaatcatgatcccgagggggacgtcgggatcgaagccgagaccctgggcggccagctcctcccgggcttcgcggaacagaacgcggatttcgccgatctcctccatttccgtgatcatcgggatgatgacccggacatttttccggacggaagcccggaggatggctcggatctgaacccggaacaattcacggttttggagcgagaaccggatcgcccgcagccccaaagccggattcggctcggcctcgattttcagctggggaagagtcttctccccgccgatgtcaatcgtccggatataaaccgggcggggaaaagcgtcccgcgccagccggtcgtagatggcgaaatgctcctcctcggtgggcagggtcgcgcgttggaggtagatgaactcggagcggaacagccccacgccctcggccccgtaggacagggcgtgacccacttcctcgggcagctcgatgttggccatcgggacgaaccggattccgtcaagggtgaccggggtccaggtcgcaatccggcggagttccttgcggtaggcttcatacttggccttcttgctctggaactccctccggatcatcagcggcggattgacgatgacctcgccgtccgtgccgtcgacgatcagctcgtcgccggcgctgacttgctgggtgatgtcgcggaggccgacgaccgtcgggatgtccagggaacgggccaggatcgcggcatgggaggtggggccgcccatgtccaggaccacggccaggacgccgccctggctgaggcggatggcggcttccgagggcaggaggtcgtgggcgacgaggattttcccccgcaggtcgtcggagacggacaatttttcgccggcgtccaagttgcggtaaatgcgggtcaggacgtcggtcacgtccgccttccgctgccggatgtattcgtcggcgatcgcgtcaaagacacgacggtaatactcatgaacctcgctcagggccgattccgtccggatgttttcctcccggatcaggcgttccaatccggaggtgagcgccggatcctggagaatcagcaggtgggcttcgaaaatgaacgcatgttcgtcgccggccatcgcccggacctggtccttgatcgtcgtgatttcatcgcccgtccgccggagggcctcgttcaagcgctcgatctcatcggcgacgcgatacggggggatatacaccttccggctggaaaacagggtccggtcggccaggaccaccggccccatgacgatcccgggggagacgccgattccccgcaggcgcaagtaatccatacgcggttctccggctactctttctcgccgaaccggccgtcgatcagatcgacgatggccttcaaggccgccgcctcgtcgtccccgttgaggcgcagggtgatttccgtcccctgggtcgcggccagggtcaaaatgccgaggatgctcttgccgtccacgtcgcttccgtccttctcgatccggacgtcggccgtgaaccggttggccaggttgacgaacttgaccgccgcccgggcgtgaagtccgaggcggttcttgatgcggacgacatgctcgatcatctcaggattttttcccgtccaggatggcgctagccaggtggatgttcttccggccctgctcgacgaccttccgggccacgtcgcgcagggacattccacgctggagggaaatgaacttgatcagcatcggcaggttggcccccgtgatgatttcgacgcttccgtccttctggaaggtgaagctgagattggagggagtgccgccgaacatgtcggtgaaaatgaccacgccgtttttctgatcgacccgctttaggctggaggcgattttcttcttcgattcctcgacatcatcgtaccagccgatggaaatcgcctcgatgttggccgtttccccgaggatgatcgtcagcacgttgaggagctcctcccccaactttccgtgcatgacgatgaggccgccgatcatttggcaatatcccggtgaaaaacctttatatcatatttccggccgcaaaggacatcccggagggcggcggcgatgacgacggaacggtggtatccgccggtgcagccgacgccgatgacgagctggctcttgccctcggcctcgaaacgagggaggagaaaattcaggaaccggcccagctcggccaggaaatccttggtttcgggccgccggaggacgaattcacggacccgggcgttcgtccccggcttctcccggagatcgtcctcatagaacggattggggagaaaccgggcgtcgaagaccaggtcggcatccaggggaatgccgtgcttatagccgaagctgatgatgcggatgatgaacggctgcttgtcggcccggaaaaaacgccgggagagaacgtcgcgaagctgggcgctggtcatcgacgacgtgttgatgacgtcgtcggccagctcgatgatggaggcgagccgcttgcgctccagccggacggcgtccaggaccgaacgaccgcgggccaacggatgcggacgccggctttcgctgaaacgttgaacgatggctccgtcggtggcgtcgaaaaagagaagccgggctccctgaattttcttgattttcgcccattctttgggaaaatcagccaggaacccgggctcgcgtatatccatgaccagggcgacgcgttccagaacctccgacttccgccgcctgaggtcgacaaacgaggggatgagcttggccggcaaattgtcgacacagaaaaagcccaggtcctcgagaaaccggctggcgaccgtctttcccgatccggagaggcccgtgatgatcaggaaacggctgggtcgatgggtcatggcttgccggtccttcccgcggcgaacgcccggttcagacgccggagcatctgatccggggcgcggcggccgcgccggagcaaaagatgggagacgcaggccacctcgatcagggtggcgatgttccgcccgggggcgacggggatattgagctgggggacgcgggttccaagaatgaggtggtcttcgggaaagcgcaggcccagccggtcgtattcctttttccggctccacttcttcaaccggatgaccaggtcgatcgtcgattcgcggagaatcgatttcgggccgaaaatataccggacgttgatgagccccaggccgcgcagctccatgaaatgacggctcagccgcggggcccggccgatgatccgcccgtcgggccggcggcggacttcaacgacatcgtccgtaatgaaccggtggccccgggcgatgagttcgatcgcgctctcgctttttcccactccgctgtcgccgatgatcagcacgcccaggccgaacatccggaggagccctcccgagacgacggccggcgcggcggaccggacggcgttcattccggacggaccaggccgaaggttccgtttttccggcggaagagaaccgcccagcggtcttcctctccctccatgcggaacatcagaacctcttttttccggaggttgaattcgacgacggcatcgccgacggacatcggtttcccggagaaataatcggcccggacgacacgcggcggaagcccggcggcggtttccccggccgcggcggcggcggtttcgcgcccgccccggcgttttttttcccggaatttcgcccgctcctttttcagcttgacgtcgagaaggtcgaaggcttcgttcatcaccgcggccgcgtcgtggccggcggccgcgacgcggatccggccctgcttcccgcggacttggatctcgacccgctgccggcttttctcagccgagaggacgacatccgcctcggtcgcccggtccagaaaacgggccaggccggccaggcgcttctcggcataggtcttgagatcgggagggatcgccgcgtgtcgagccgtgaagtggacgttcatcaagactcctccattaggaatttgcgcttgcggatatgcgagggaaggatatccagctgctggcggtatttggccaccgtccggcgggcgatggggaaattctcccgggtcaggatttcctcgatttccatgtcgctcatcgggcgggatttgtcttcggattcgatcaggcgccggaggcggtccttgacccggagagaggagatctcctcgccgaatccgccctggagcgacttatggaaaaaatacttcagggaatacgtgccgcgcggagtgatcatgtacttgttggcgacgacgcgtccgaccgtggactcgtgaaccccgatctcctgggcgatttccatgagcgtcagcggctgaaggccgtcgagccccttttcgaagaaatccttctggcggtcgacgatcgccttggcgaccttgtaaatcgtctggtcgcgctgatccaggctccgcaaaaaccagagagctttcttcatcttgtccttgagataccggtaggcctccggattctccttcaaggcccgggccagaagccggcggtaataggcgttgatgcggagccggggcaggccctcatcgttgagggcgaccttgaactcgccgctctccttggagaccgtgatgtccggaacgacgaaatgcgtccggtcctcgccgtacttgcggcccggggccggatccagctgcttaatgatctccagatgaaccttgacctcggccaggggaaggttgagaagcttggcgacctggccgaaatccgacttttcaagaaggggaagatgctcggagatcatcgcccgggcggcttcttccttgatttgcaggttgtccatctgggccagcaggcattccttcaaatccaggccgccgcagcccaccggatcgaactgaaggatcttagcctggacatcgcggacgcgctcgatcggggccccggcgctgagcccgatctcatccagggatgacgtcaggtatccgtcgtcgttgatattcccgatgatccgctcggcgatctcccggtcgagaggatcgaagaacgtcaaattggcctgccaggtcagatggtccccgagcgaggcgctctgggagatcatgttttcgatgttgggcgcttccggcggctcggccggccccgcccggaagccgtcgtcgatgtattcctggaaataggattcgaattcccggtcctcggccaaggattcttcggcttccccggccgtgcccgcgggaagatcttccgacgcgcttggggccgccggggtttcctcgacgctcttcacttccggactttcctcctcgagctcaagaagaggattggccgacagctcctcgtcgatgacctcgatcagctcgaggttggtgagaggcaaaagcttgatcgcctgctgcagggcgggagccagaatcagcttctggacctgccgctgatcaagacgctgtttcaaagccatggtgatccgccgttgcgctccgtttaaactcgaaaatcctcgccgagatagcgccgccgcacttccggggaggcgacgaccgcttccggagaaccttcctcgacgatccgtcccttgtcgatgatcgccgcccggtcgacgatccggagggtgtcctggacgttgtgatcggtgatcaaaacgcccaacccgtcgtccttcatgttccggacgatccgctgcaaatcctggatggcgatcggatcgatgccggtgaacggctcgtccagcaagatgaattccggagaggtcatcatcgcccgggcgatttccagcctccggcgctcgccgccggacagcgtataggccttggcccgggcgagggattccagcccgtattcccggagcttcctccgggcgtctccgcgccgccggcccgccggccgggcgattgccagaaggttatcctcggccgtcagccggcggaaagaagagggatcctggggaagaaggcaaatccccttccgagcccgtaaatacataggatcgtccgtgatgtcctcgccgttgagataaatccgacccgcgtcacgggcgacaagcccgagaatcatggaaaacgtcgtcgttttccccgccccgttgggccccaggagaccgacgatctctcctctttggatctcaatggagatatcgtcgacgacctttttgccgtcgtaggatttggataaatgagaagcattcagcgacgatttcatcgctcacgacttgatgatggtggtggatcgctcggcgtccttgttttcgattaaaatcctaccatcggagggatggaaagtcaatttgccgtccttgtggatgacccccttggccaggtcctccaggacggtatttcccgtcaggacgatcacatcctcgctgaggtcgtagacggcccggtcgccccgggccgtgttcgccccctgggtaacggtgacccgctcctgatcagcgatgatccggcggtatttttccccgtcctctccgacgccgggctcgagaatcagccggccggctttcagaacgatttctccgaccgtcaaggaacaggagtccaggaagaggatgtttccttttttcgactgacgggccatgcgtccgccggtgacttccacgcgttgatcctcgtttttcttttgatcgcgatgaaaaaacaccgaccggacgttcccggacgcggagatgtcgcccctggcctcgaagatcaggacgtcccggccttccagggattcccggccctgccaaaggcgggccccctcgcccaggcggaattgcctctcgccgccttcgtaatgggccagtccggcggtcatgaacgtcgtccgtccggaggcgaacagggcggcgtcgccggcgtttccggcttccggatgggaaacgattttgactccgccccgcgcatcgagatttttcgtttggagattgagggcgatccattcggcggtgatctcccgtccccccgaaatcgtccgggccggctcggccgccgtcccgttcgccgccaggagaccggaatcggcgccgtaattgatggtcggcgcctccaggagccgcattcggccttccgcctcaccccggatccgggcccgggtctgcagccggaacgcctgcagagcccaaccctcatcataaaaaaacaccgtatcccgcgcttccaaagtcgtctggcgcccggcttcgccgaggatgtcgacccgggcgccgccctgcatggagccgtagcgcgcccagccctcggttccgtaaggaacgaacatcatcgacccggcctccatccgctgccgcccgccttggaagaagatcagttcgtcatctgcgggagaggcctcgcccgctttcggcttggccgggacggccgccgggaccgcccgttcgtccgcctcccatttcacgtttccgtggaagtcgaatagccgaaactcgggcttgtcgggaaactgggcgaagaagacgtcgttgcagcggccgcggctccggccgtgggcgatacggacgtcaccgcggatttcccccgtccgcggctgccgggcataggtcatcgatttcccggtgatgatcaccggaacggggtcgtcgtcccagggcgcggtgaccagggtgattcccccggaaaaaacaaaatattcatccgtgacgttgtacgtggcccggcggcagtcgccccggaaccgccggccctcgaaaaccgcgggaacgttggtgaccaccgcgtcccggtttttgtgataggtgaaggaggcgcctttcacggtgaggtcgtcgaggcggatttccacgccgccccggaacacaaggcgggtccaatccgcatcgtagatcacttcctccgcgaacgccgcgaacttcagttgtccgtcgcgggcgcggctttcgacgcggaccccgccgcccttttccccttccggtcccttgaggtgatagagtccgacggcatccgtaaaattccgggcggcctggacatccagaatgtttcttcctcccgtgtctttcacgaaatggatattttccttgacgtccactttttgcgtggtcagcggccgcgtctcgggccgaatggccgccggacggtcggaccggcggcttaaaaagacgaaaacaacggcgaggaggacggccagaaagccgatgaggagaacgcggacggccgttttcgcccggcttcgggaagacggatgagccatggattctctcatcccgcccggagatcctcgagcgccagatacgggcgctcttcgccgagataggcggacgtctggaaggtgaacacgccgtcgatccggcttccggccggaaattcccccgcccaggcgccccggttccagccgatcgcctcgaacgtccggccgtccttccgcagaaggaacttgacgtggcggtccttgagcttgcggggctcggccgcgacgacggccccctcggtcagaaaaacaggccggggattgccgacgccgtggggctcgagaagagcgaggccgcgccacaagtccgccccgatgtcggtgaactccagccggctgtcgatggcgatcgagggtcgcagatcatcgaaggtcaagcgggcgtcgacggcccggttcatcgcctccttgaaggccggcacggattcccggcgaagggtgcagccgacggcctgccggtgtccgccatagctcaggaagaagggccgggcctcctcgaggcaatcgatcagggagaatccgggaatcgatcgccccgagccgaaggcgcagccgtcgtcgtaggaaaacaggacgaccggccgatgaaagatttccttcaagcgggaggcgacgatcccgatgattccccgatgccatttttcatccccgaggatcaagatcttatgcgtttcggccaatcccccggcccggacgcgcccctcggcgtcggccaggatggaatcctcggtttcctggcgccgccggttgaggacgtccaactcgccggccacggcggccgcctcggccgcggacttcgagaaaaagagacggagggcgagctccgtccggcccatccgtccggccgcgttgatccgcggacccaggcggaagccgacgtccccgacggtcaccggccggccggtcaggccgcagatttccatcaggctccgcaggccgggattggacacccgggccagctcggccaggccccgccgaacgaggatgcggttctcgccgcgaaggtcgacgacgtcggcgacggtcccaatggcgacgagcttgagataatggggaagaacgccggcccgtccggctctctggtagagcgcttgaatgagcttgaacgccaccccgacgccggccaggttccgatcgggataacccgcttccggcaggaccgggtcgagaacggccagggccgccggccgctcgggtcccgggaggtgatgatcggtgatgatgacatccacaccggcggccgcggccgcgcggacgaagccggcggatttgatgccgcaatcgacgctgacgacgagccgggctccgcgcgcgacaaccgcctccgcgtggccgtccttgatcccgtacccgtccttgagccgttccgggatgaagcaatcgaccttccccccgagcgccgacagcgccttatggagcatcaccgtggccagcacgccgtcgacgtcgtaatccccgaagatcaggattgtctccttttcccggatcgctttttcgatccgggcgacggccgcgtccatgccggaaagcaggaacgggtcggggatgtcctccaagccggcctcgaggaaaagccttgccccggcggcgtccgtgaaaccgcgattggccagaatctgcccgaggaccggcggcagtccgagggcggcggccaaggcgggagccgcggtcgagggcggggcgatgctccaggccgtttcgctcatttcatctttcactttaacacatcggcgggccgcctcaaagcacgcttctcctccattcgttgacttgacccccggcggaatctataatcctttcatcatgttaggacgactctgggacggcctggcgaaaacccgacaggcctggaaagaccgtttcgggaaggtcttcggccccggacggccgcgcgaggagattctcgagactctttcggaatccttgatcctggccgacgcgggcgttcccgtggccgaaaaaatcacggccgccgtccggaaccggaccaaaaaaaacgacgacgcggaaacgctggaatccgtccttaaaagcgagctcatcgagcttctttcccgccgccaaatccgggacgaaggaccgggattgtccggcgtcatcctcctggtcggagtcaacggaggcgggaaaacgacgacggcggccaagatcgcccagcgggccgcggccgaggggaaacgggttctcctggtggcggccgacacattccgggcggccgcccaggaacaattggcgatctgggggcgccggctgggcgtccccgtccatcaaggccggccgggatcggatccggccgccgtggttttcgacgccgcccgcgaattcctcgccggcggatatgacctgatgatcgtcgacacggccggacgcatccacaccaacgccaacttgatgagcgagctggataaaatcaagaggatcgtctcccgcgagatcgacggccggccggtcgagacctggctcattctggacgcggctctcggacaaaacgccctcgttcaagcccgggaattccgcaagtgcgccggcctcagcggattagttttaaccaagctggacggcaccgcccggggaggcgcggtgctggcgatcgccgacgagtacaacctgcccatccgcctggtcggcactggcgaaggagccgaggatatggaggacttcgacccggccgccttcgtcgaggccctgatgtcatgatcgacgagcgcgatctcgcctacctggacatggccgaggccctggccgtccaggcgctcggccgcacgtccccgaatccccatgtcggagcggtcgtcgtccgccgcgggcggatcgtcgggaccggcttccacgaagcggccgggcgggagcacgccgaaaccgccgctctccggcgggccgggaaaaacgcgcgcggggcgactctttatctcaccctggagccgtgcgttcactggggacggacgcccccctgcgccgaatccgtcctgacgtccggaatcgtccgggccgtcatcgctggtctcgatcccaatcccgtcatccgcggccggggcgtacggttcctgcggacggcgggcctcgccgtggacgtcgccggccgcccggagcggaaatccgggctcaatgaagcccacgccaggtacatcgtcgaccggcggcccttcgtcaccttgaaatccgccctcagcctcgacggcaagctggccacccggacgggggaatccgcctggatctcgtctctcgaagcccggcgctacgcccatttcctccggtccgaaaacgacgcggttctggtcggagcccaaacggttcggcacgacgatccgcgcctgaccgtccggccgccgggacgaaggggcaagcccgtcctgcgggtcgtcctcgatcccgacctccggactcctccggaagcccggctgtttgaggttccgtcggacgggccggtgctgttgtatgcccgggccggaaaccgggattgggaggcccgcaaggcccgccttcttcgacgcggagccgaggtgaccgagcttcccggcgaaggaccgcggctggatctgcggcgtgttctttccgacctcggatcgagggaaatcgccgcccttcttgtcgaaggcgggggccgcacggcggccggattccttgacgagggcttggtcgataaagtcgttctggccgtcgccccgatactgatcggcggagcggacgccgtggcgctcttcgccggccggggggcggaccggctggccgccgctccccgcctgtcccgcgtttcctcattccgcctcggcggagacctcatcttggaggggtatatctgatgttcaccggcatcatccaggccagggggattttccggggcttccgggaaaacgggcgggaaatgatcgtcgaatccccggaagcggccgggaggatcgcgccgggacaaagcctggccgtcgacggcgtctgcctgactctcgtccgcaaggaaggacatcgcctttttttcaacacggtccgggaaacgctcgagcggacgaatttttccctccgccgccccggcgagacgctcaatctcgaatatcccctgaccttggccgatccgctggggggacatctcgtctcgggacacgtggatttcacgagcaagatcaagcgcgtttcttcccggtcgtcgggccgccgcctggccgtcatcctgccggccgccttccggccgttcgtcgtcgcccaaggatcgatcgcgatcaacggcgtcagcctgactgtggccgcggtcgggccgggatcgttcgacgtcgagctgatcccggaaactctgggccggacgaatttggcggacctgcgggccgggaaggccgttcacgtcgaatgtgacatgctcggaaaatacgtgtataattttcttcacttccataagcgttaggacgtatccatggccgttaaagctccccacgcggtgaacgttgaacgggccctcgaggccgttcgcgccggccgcctgatcatcatcaccgacgacgaggaccgggaaaacgagggcgatttcatggtcgccgcagaaaaaacgactccggaagtcgtcaatttcatggccacctacggccggggactcatctgcctccccctcacccgggagcgtctccagcagctccagcttccgctcatggtccaggagaacacggcccgcttccagaccgccttcaccgtgacgatcgacgccgttgagggtatcacgacgggcatttccgccttcgaccgggcggcgaccatccgggcggccatcgatcccaagaccaagccgtcggatctggccaagccgggacacatcctccccctccaggccaaggagggcggcgtgctggcccgggccggccagaccgaggcgtccgtcgacctcgcccggatggccggactcaccccggccggggtgatctgcgagatcatgaaccccgacggaacgatggcccggcggccggagctcgaacgcctgagccgcgagcacggaatccccatcctgacgatcgccgatctcatccagtaccggatgcagacggaatgcctggtccgcaaagtctccgaagccgacctcccgacaaaatacggaaccttccggatcttcatctttgaggacgagatccacggggaaacgcatgtcgccctcgtcaagggcgatatctccggcgaccggcccgtgctggtccgggcccattcccagtgcctgaccggcgacgcgttcggctccagccggtgcgattgcggggaacagctccacggggccatgacgatgatcgaaaaggaaggatcgggcgtcgtcctctacatcctcaaccatgaggggcggggcatcggcctggccgccaaaatccaggcctacgcgatccaagaccagggagccgacacagtcgaagccaacacccggctcggcttcaagcccgaccagcgggactacggcatcggcgcccagattctggtcgccctcgggatcaagcggctccggctgatcaccaacaatccgcgcaagttcatcggcctcagcggctacggcctggagatcgtcgagcgcgtccccttggagatcgcccccaacgcgatcaacgcggactacctgaaaaccaaaaaggataaaatgggacatattttagaaatggtctgaccgtgaccaagttcctccgccggcccgaacccgcctctccggacgtggtcgaacaggccctccgggatatcgaaagcctcttgccggcggaaacgcagaccggcgatacccaagctttcaccaacgctctcctcaagaagctggatattttccgtgaccgcgccaagaagatgaggatgatgcgggccctggcccacctggacgccccctggattccttccgtttttcttgagctcctgggggacagcatcgaggaaatccgggacttggccgtccgcgagctgtccaggcgcgacaactggccggccgccgccctttacgagcgtctcgaccggcctccctggtacgccaagagcgcctgtctccgcgtcctggccgaaaagaaagaccgcgccgccgccgtccacattaagcgcttgatcgacgatcccaacgtcgacgtccggcgggccgcggccctcgcccttggggcgatcggcggcccggcggcccgtctcctgctggtccgtttgacccgggataaaagccgctatgtccgggccgcggccgaagaaatgctcgaccggatctgcgatttcaagttcagctgagcggttttccggccggcgcggggccgccggccgaatccaagacgaaggtgaccgggccatcgttgaccaagcggaccagcatctcggcctgaaacaccccggtcgaaacctccaatccggtcgaacgaagggccgcgacaaagcgatcgaagagggccgcggcccgggcgggttcctcggcgccgtcgaagctcggacgacggcccttgcggaccgaagccgccagggtgaattgggaaacggccaggatcgctccgccggcttcggcgacgtcgaggttcatccggccttcggcgtcggagaagacacggagggaagcggctttgcgggcgagtcggtcggcgtcggcctcggcgtcgcctttctcgactcccaccaaaagacacaagccagggccgatccgggagacgacctcgccgccggtttggaccgaagcctcccggacgcgctgcaggacgactctcaaggcattctccaggggcggaatttgacttttaaaggcctttcttttattatacttcgacttccaaggagaaaaccatggctaaacacgcctcggctgaacgccagcatcgcgcgagccttcgccgcaacgccgtcaacaccaagaacaagtcttccctgcggacccaggtcaagaagcttcgcgttttgatcaaagccggggacaagagcgaggctcagaaagccctgccgtccgtgaacaagatcatcgaccaaaccgtcaaaaaaggggcgatccacaagaacacgggttcccggtataaatcccgcctgagccggcagatcacgaaaatcagcgacgccccggcgaagtgatccggcgcccgggcgcctttcttccatagccgacgacgaacgcctggatcatttccttgggcgcggcggccgtcgatttgaggcggcggtccatgtcctccagctcctccagccagcgaagcaggtcggcgtccttgatccgtccgagcagggcgaggtattccccgagcatcctctggtagaagccgccgaaccgttcgctgatcgacggcttggcttcccggaaaacctccttgggatcccggccctcccgaagcccggctttggccagaagggcggtccggaaaaatccggataggaccgccaggatcatctccggcgcctcgccgttttcgaacaggctttcgatgataatcaaggccttgtccgtatcgccggcctccagggccgcggtcaactcccagttgtcgaagcttctggccgagcagagggcggccacatcatcggcttcgaccgttcttcgcggccccaagtaaacggcgagcttttccacttcggaatcgatccgggcgatctcgccgccggcgatgtctaaaatcctttccacggcttccggcgtcgcctgtttccccagggattcgaacttttccgccgtcaaggacttgatctcccggtccttgcgcggagcgatctcctcgatgcgggcgaggggaccgggcagggccgcgatcgacttccccaagggccgggttttccggatcttcccctcgaaaagaacgatgatcgtcgtttggggggcgggagaagcgaagtaatcccggaaggcggccgcttccccggccgagaggtcctcctgtcccgcgccctttccctcgacgatcaagagacgccaaggcgagaaaaaaaaaggcatgtttcgggcggcgtcgagaacttcggtccagcggcgatcggccaggatgaaggtctcgacttcaacggccgcctcgccggggccggccaaccggcggcggagctcggcgacgaagccgcgggcttcatacaagtcctcgccgcagaaaaaataggccgggcggacgtcctcgggccggtccggaacgggcaagaaggatccggccatccctcagaatccctcgacgatgaaaaccaccaggtttttcgcgaacagcttggcgatttggtccaaagcctcggtttcctgggattcgaaatccatcccctcggggacttcgtattcccctcgatagacaaacgccggattggaaaaaaggaccgtgtttttcttgatgtccttcagaaccacggaggcgcggatcgtgattgaatagcggtcggccgatccctgggctcccgtataggcgatgggctcgacgatgaatccctggatttcaccctccaggatcccgtcggcggactcggagcccgggacgaccgcgacccggccccgggagataaattcgctgatgacggcttccgtcagcttgacatcgacctcgtaacgcgtcgtcaggttcttgaagatggggatataaaccgaggagatgttccggtcggccaggaaccggcccgacccccgaaccatgtacccgcacgaggcgcaggcgaacaccagcccgaccgccagaccggcccggaaggaggccggaaacatccttgctttccccgggttcatttgtccctcgttgtcttcagattcgatcctcttcattatactcgattcaagcgccgtccattcctccgggccggccaagccggcggcccgccgcccgccgggggggccggctcccctgagccgccctcgtcaaacaacgatgttgacgatctttcccttgatgacgacgactttccggacggttttgccttccagcagctcccggatccggggcagggccagggccgcttccttgacggcctcctcggccgcgtcatgctcggcctcgaatttgtcccggaccttcccgttgatttcgacgacgatcgtcgccttctcctccatcgccaggatcggatcaaaggacggccagggcgcgcggaggaccagcgtctcatggcccgtcccccgccacatttcctcgcagacatggggcgtgaacggagccaaggccaggatgagcgcctccattccttcggccaggagagcccttccctcggccgaattccgaagagcctctttttccttccgcaggacattggccagctccatgacggccgagacagcggtgttgagatgaaatcggatttcgatgtcctcgcccaccttgcggatggtctgatggatttttttccggagacgggcggccgcggccggatcgacggtcccgcctgccggcggctcctccccggccgacaaggccgtgatctcgcggtagagctgccaaaccctccccacgaaccggtaacacccttcgatgccttcctcgttccaggcgaattccttttccggaggggcggcgaacaggacgaacaagcggagggcgtcggccccgtaatgccccagcatttcgtccgggtcgacgacattgcccttggatttcgacatggccgcgccgcccatcgtcaccatgccttgggccaagtagtgggggaacggctcatccaaggcggtcaatccgaggtcgcggagcagcttggtgaagaagcgggaatagatcaagtggaggatggcgtgctcgacgccgccgatatagagatcgacgggcagccaatggtcggccgcttcccgcctgaacgggaggcgatcctcggccggggaagcatagcggaaaaaataccaggacgaatcaacgaacgtgtccatcgtgtcggtttcgcgccgggccggccggccgcacttcgggcaagcgacgttgacgaaggaggggatcttctccaggggcgagcccgcctctccggtgaaccgagcctcgtaagggatgcggaccggaaggtcttcgtagggaacggggacgattccgcaggcggagcagtggatcatcggaatgggcgtgccccagtagcgctggcgggagatgccccaatcgcggagccggtaagtgacggccgcttggccgacgccctggctttcggcccaaccggccattttttttgccgcctcgtccgaagtcaatccgtcgtaggggccgctctgaacaaggacgccccggtcctcgaacaacccggccgccggatcccgcggggagccggcggggacgatgacctcgcggatcggcaggccgtatttccgggcgaaatcgaaatcgcggccgtcatgggccggaacggccatgatcgctcccgtcccgtactccatcaggacgtaattggccagccaaatcgggacgggttcgcccgagaacggattgacggcggtgacgccggtgtccacgccttccttctcggcctcgccgatctcccgcttggcccgggcggcggcgatcgtcttggcaagccaggcgcgaagctcggcctcccggggcccccggaccagatcgccgaccaggggatgctcgggcgaaagaacgaggaacgtcgccccaaagatcgtgtccaggcgggtggtgaaaacccggatcgatttcccaagcgacggcacgtcgaaattcagataggcgccctcgcttcggccgatccaatttttctgcatggccaggacgtgttcgggccacttgcccagctgggcgtgaccggagaggagctcgtcggcgtaggcggtgattttgaggaaccattgttccatctttttctgctcgacggccgaggagcagcgccagcaaacaccgccggccgcctgctcgttggccaggacggtccggcaggacgggcaccaattgacccagctttcccggcgataggccaggccgcgctcaaccatcttgaggaagatccactggttccaggtgtagtattcgggcaaacacgtgttgacttcccgcgaccagtcgtaggcgaatcccatcctctggagctgggccttcatgtgggcgatattgtccagcgtccacttttggggatggatgccggacttaatggcggcgttctcggccggcatgcccagggcgtcccagccgatgggatggagaacatcatacccccgcatcatcttaaaccgggcgatcacgtcgccgatggaatagttgcggacgtggcccatgtggatccggcccgacggatagggatacatctcgagggcgtaaaacttcgggcggccgggatcggcggccgcggcgaaagcgccggcggcgttccactccatctgccagcgggcctcgatggcctggaaatcgtaatctcgggcggcgttatccttgctcatgatcggtgcgtccttctcgcgttcgtcggccgacgaaacggtcgcgcggggatggaattccgcgttcagtgtaggggggccggggggaaatgtcaacgctcttacggacgccagccgctccgcaggttgcccccaacagaggatgttctctctgcgatcctcggcttcggccggatttttcaaaggcgggacgatcccctcttgggaaaggtttcaaaggcttgacaggcggcccgggagggcgtttccggacggctgaatcttattgacaatccatcgcgtctcggacacaattacgaggagagagagtttggatccaattccaaaaaaggaggatatgatgaaaagaacggttctgaggagcaagacggggaagaagctttacgcggtgagggacgccaagggacgcttcgtcgatattcaatcgtacaagagagcccatggtcaagacatcaagcgcaaatccaaaaaagagaaatgagcatggcctttctcgacgaattcatgcaagcctacggcggccaagcgagccgtgacctgtcggcgggtctgggcctcaaaaaggccgcggccgcccagatcattccggcggtcgttccgatgatcctgggagggctgaagcggcagatggaaacccagggaggcgccgcccggatcgaccacatcctgaacaaatacggcagcgattccgttctggatgacatcgccggggcgatcggcaaccgcgccggccaagccgccgatgctcagctgggcggccttctaggctcttcgggcctccaagccacggacatgatcgcccggcgtttcaagctggaccccggtgtcgccgcgaaaatcataccggccctggccccgctgatcctcggcgctctcagccggaagaaaaacacctcggcggatggattgggcggaatcgccgccctgctcgaccgagacggggacggcagcatcctcgacgatgtcgccgggatgttgttccaaggttcagcctccccctcctcgggcggagggctgggaaaactccttggcgggcttttcggcggacggcgctgaccggtccgattttcgccggcgtattcttcgccgacgacgggacagagggaaggctacttcgggatccgcagcttctgcccgacccggataagatcgggattggccaggatgtcccggttcgcttcgaaaattttcatgtacatcccggccttgccgtaatacttcaaggccagagcgctcagggtgtctccggcgacgacgacatgcacctgttcggcttcggccggggcggccgccggaggagcggtcgccggggcgggcgtctccgcgagcctgatcttgttgatcgtgttctccgtgttgaccagggcattgaactcgttgacgacccggcctttgacgttaagatcgggagcatccccttccagggtcacgaccttgccgtccaggaccgcccggaggtttttcacctcggggaccttggccttgaccgcggccacggcctcatcgactttttgagcaaacgatttgccgaataatcccatggctctctctcctttccatcgttccggcaagccctatcgtaatggggtcgcggaggcgaagtcaagaaaaaacgccccccgaggcccatgtcaactcatctaaacaggtaatccaaggtgggattgttcactcaccaaaaaggcaaccatagaaaggacctgctttttatagggattaacgcggatcggccgctttttcttctttcgataaagatcatagagccgcgcccgcttccggtcgatctgcttgcaatcccgtcccgtttcgggtagaatcgccgttcgattccggggttcgtcttcttccgcctcttgttttcctctccgaagtccatcgaaatccccggcaaactcgcatttccacgaagggtaacggccatggccacgacaattgaacgaatgcgcaatatcggtatcagcgcccacatcgacagcggcaagaccacgctgtctgaaaggatcctttattactgcggcaagatccaccgggttcacgaggtcaagggcaaggacggagtgggcgcgaccatggacagcatggacctcgagcgtgaacggggcatcaccatcgcctcggccgcgaccagcgtctcctgggccgaacatcggatcaacatcatcgacaccccgggtcacgtcgatttcaccatcgaggtggaacggtcgctgcgggtgctggacggggccgtcttggtcctttgctcggtgggcggcgtccagtcccaaacgatcaccgtcgaccgccagctccgccgttacgacgtcccccggctcgccttcatcaacaagtgcgaccgggtcggcgccaatccgcaaaaaatccgggaccagctggaggaaaagctcaagcacaacgccgtcctgatgcagatcccgatcggcctggaggaccatcaccagggcgtcgtcgacctcgtctccatgcaggccgtcctgtttgaaggcgacgaaatccgccgaggggaaatcccgcccgacctccgcgaggaggcgcaccgccgccggaatgatcttctcgacgccgcctcgatgttctccgacgagctgaccgaggccattctcgaggaccgggtcaccgaggagctcattcacgcggccgtccggcgcggcacgatcgcccggaagctgaccccggttttcatgggctcggcctataaaaacaaggggatccaagcgctgctggacggcatcgtccgctatcttcccgatccgtccgaggtcaaaaacatcgccgtcgaccaatccgccccccccgatgctccggccgaggtcgtcctgtcctccgacccggacgccccgcccgtcctcctggccttcaagctcgaggacgggccgtacggccagttgacctatatccggatctatcaaggccggatccaaaaagggacggagcttcagaacgcccggtccggccagcgaatcaaggtcggccggctcatccggatgcacgccgaccacatggaggatatcccggaagccacagccggggacatcgcggccctgttcggcattgattgcgcctcgggcgataccttcaccgatccctcttgcccctataccttgacctccatcttcgtcccggagccggttatctccctggccgtctccgcgccggataaaagggcgctcgaccggctggccaaggccctgaaccggttcagcaaggaggatccgacattccggacgttcgtcgatcccgagtcgcacgaaacgatcatccagggcatgggcgagctccatctcgacgtctacgtcgagcggatgaagcgggaatacaacgtcgaggtcgccactggaaagccgcaggtcgcctaccgggaagccatcaccaagaaggcagaattcgattacactcataagaaacagaccggcggggcgggccagtacggccgggtcatcggctatctcgagccgctggccgacggggcgtacgagttcgtcaatcaggtcaagggcggccgcatcccccgggaattcattccctcctgcgacaagggctgcaagacggcggtcaagaagggcggcgtgatcgggttccccgtcaccggcgtccgggtcgtcctgacggacggccagtaccacgaggtcgattcctcggacaacgccttccaggcggccgccctcggagccttccgccaggcctacgccaaggccaagcccgtgatcctcgaaccggtgatgaaagtctccgtggaaggtccttccgaattcgccggcgccgtgttcggctcgatcaaccagcgccggggggtgatcgtcagctcgatcgaggacgggagcttctcccgggtcgatgccgaagttcccttgagcgagatgttcggctattcgaaccagctgcggtccctgacccaaggcaaggccgaattcacgatggaattcctcaagtacggccgggtccccgcggccgtggccgaggagctgcaaaagcaacacgccgaaaaaagagcccgcgagaccgggtaaggagaatatcgccgatggatgccaaacacctgatcaagcgcagccccctccgggtcctggaggattccacccacggcggtccgggccccggcggcctggccgtgctggcctctccgaagggcgtgggcaagaccgcctgcctcgttcacatcgccaccgacaagcttttccaggggaaggcggtcatccacgtctcctactccagccgggtggattacatcatgacctggtacgaggacatcttcaaggagatcgtcaaaacccaccgcctgcgcgactccgaaaccgtttacgacgagatcatcaaaaaccgggtcatcatgaatttcaagcaggacgggatgagaaccgggcaagtccttcgcagcctcgaggcgatgatcaccggggggaaattcgacgccgatacgatcatcgtcgacggatataatttcggcctggccgcgccggacgacctcgaccggttcaaggacttcgcccgacggatgaacgtgtcgatctggttcagcgcgtccctgaaggagaccggaggggagatgttcggaccggacggaacgccggtcctgctcgccccgcacgccggccggatcgacgttctcatcaccctcgaggccaagagcgacgccgtcgaaatccgggtggtcaaggatcatgataatccgccggccggcgtccttccgatccggctcgatccccggacgctcctgatcgcccaggaaaaataaccggacgcgaaaaaaacaaacgagcccggttcccggaaatcttgcaaatcccccaaggggacactacactggtccggtgagcgcaagacgtctggttcttcttccggcgatcctggccgcggcctcgatcgccgccgggctcctcgcccaggagcgcctgattcgcgacgaccggggccgggaattccgcctggagggccggccgagccgggtcatttcgctcgccccgaacatcaccgaaattcttttcaccctgggggccggaagccaagtggccggcgtcacccgttattgcgattatcctccggaagcggcggaaaagatcaggatcgggggctttctcgacccggacatcgaacggatccggaaagccgctcccgatctcatcatcgccttccgcggcaatccctgggaacgaatcgagcggctggatgacctgggcctccgggttttcgtcctggacatcggcttccggctcgaggaaatccgcccgctcgtcgaaaaaatcgggacggtcgtcggccggacgtccgaagccgggattctcgcccgggccctgacggacaaagcggcccgggtcgccgccgccctttccggagtcgccgtccggccgcgcgtcttcctcaagctccaaggggagggcctttggacctgcgggcgggacagctatttcaccgatttggtcgaaaaggcgggaggaacgagcgtcacggccggcttggagaaaagctggctcgaatacagcgtggaaagcctggtccgggacgatccggacgtcatcgtcgtcctggcgccttcccccgccgagttcgaacggacgcgggcctggctgaacagccggccgggcctgcgggccacgacggccgtccgcaacggacggatcctccgcctggacgaaaacgcggccagccggttcggtccgcggctgttcgattcgcttgaagagctcgccggccttctccatccggaaaaatttcctccggggcgaaccgcggcgaaggagtaagatgatcacttattttttcgtcaaggacgcccggaaagatccgcggctgttctgttccgaaccgccggggccgatgccagcccgcttttcgaaaaccaaggaggtttgggaagcggccaagaaaaagctcatgctcctgcccgcccggacccttcgccaggaggaagccctggccaaggccgtccgcctcaaggatcccgcggtcaccgttctctgcggcgaggcggaggagaagcacgccgacctccggttccacttctttctgcataagcgccggacccagcggattctgcttctggtcggagaggggatcctggcgcccttcaccgggctgatcgccttcctgcccggcccgaacatcgttttttacgccctagccctgatcatgatcacccactggcagtcgctccgcggcatccgggcgctgctcgcgaaaaagcatgaataccgggttgatccgcttctttcggaatgggagctggccgtcgccgagggccgggaggcggactaccccgggatcatcgcccggttggagcgggcccacggtttgaaagacatgcgcaaggtgctttacggctaggaccctcccgattttcgaataacgcccggactctcatggggaggcgaaagagagattcgaggcgtcgcggcaattagttgacttaatcaactatttcggctattctgccccgagactcatccctggttccaaaggaacgtcgccatgaagaatgcgctcgccgtcttattcgatgccttgcaagagatgacattgcttttcggaagcgggggaatagacggagaatgctgcggggatctttcgttcatcgagttcgtcgcgataaaaaaggcccgggaacaccccggacttatgatcaaagacctcgggcacgccttgaatctcacgaaaagcggagcaacccgaatcgtcgatcgtctcgaaaagaaaggatatcttcggcggaatatctccccccatgacggccgcgtctgctgtgtgacgatttccccgcggggagcacgcatcgtcgcccgagtggaaggtcgcgaaatcggccgcctcggccgggcgcttcaggccgtcggccgcggcaaaatcgataaaatcgcaagtgacatggctttgatctcgcgcgccttgcgaaaaatcaccccgccgaaatcggctccggggaaacggtagaaaggaggacgggaccgtgaattcgctgaacgaggcgatcaaatatttcctggtgatcatggcggagctctcgattctttttctcgggatcagcgccatcatcgccttggcttttatgtatattcccaggaataaaatcaatcgctggatcgccggcaaaggtctttggggtaatgtcatgggagtgcttttcggggccgtcacgccgttttgcgcttgttccacggttcccatgacgcttggtttcctccaagccggcgttcccttcggcgcggtgatgtcgtttgtcgtctcttccccattgatggatccgctgattttttccctgctggtcgcttttctgggatggaaagtcgccctgggattttttctcttgacctccgcatttgccattgttttcggggttcttctagagaaattaggctgggcgaatcaaataaaaaacgtccgcgtgaaaaaaatcggccctgatccggacaaaggcgttcccgaaggattcaaaaatcgtctccacgccgcggttttcaaagcctggggagacttccaatcggttttcatctacatgatagtcggcgtcggcatcggggcggcgatctacggatatcttcccgaagatctcctcgctaaaatcgccggagccggccatccgctttccgtagtcatcgtcgccttgataagcatgccgctttacctgcgggtggagtccgcgatcccgatcgggctggccctgatggagaagggggcgagcatcggggccgttatcgccttgatcatcagcggggcgggaatcgcgattccggagctgaccatgctcgccggcattttcaagaaaaagattatcatcggattatcgatcattgtgttcgtttcggccgtcctgtccggcttgatttttaacctgttggcttaaatccgggaaaacgttcaagggatttcaaaggagaacatggatccatggaaaacaaaaaagagaagaaagggattttttcgcgtctaacgggcggcgcgaagccgaaaaagagcccttgttgcggcggtttcgtccttgaggaaatccccgaggagaaaaaggaaagcgggaaagagccgcattctccgaaagacaagaacggctcctgctgcggataattcacggttactttgcaggaggcgttcggatcatatccgcgatcttctcaagatcccgaaaacgagagcgcgtccgccaggcggacgtcgcggccgttgcccgggcggcgatgaattcacaaggccggttgacctggacggaagagctttcttccgctgcacccggacgccaggcatagggatcaacgagaaagcccgacaaaccgccgcgacggacggacgcctgggaatcctgttcaagactgcggcctcgtctccctccacggaaaatcttcttcgctcccgggcaactcatccctaacgacgtcccggatcctgtctcaaatcccgtggatcgccggaatatttcttcgccgaatccaaagcgcgccgcggaataagggaaacgccgatgcttttaaaagacgacggccaaaaagaccgggcggttttcatgggccgtatcgaaggggagggctgatcttgccgcgtgaccagacggcggattcgccccggcctttcaacggatccggggaatgatcgatgtcggcctcggcccaggccgggagagcggccgaaagaaatcttgattatatgaagatattatcatattataatggactttaaaaagaggccaggccatgcccgacattcttcgcgtgttcaaatcccttgccgatccgacccgcttgcggatcgtccggctgctccttcagcaggacctctgcgtctgcgagctcatgtttgtcctggagatggctcaatcccgcgtttcccatcaactcaggatcctccgggacgccagtctcgtggaagatgtccgggatgggcaatggatcatctatcgtcttccggacaacgtccggacgacgatcgccccccttctcgcccttttcaaagaggataaaaaatccgccggggcaattcatgcggaccgccggcggctttccgcttgccggaaagaaggagttcgaaagaaaagatgttcccctgtcgagtccctcaaatcgaaggcggaagaaaagccggcgtcggcgaaaaagcgatccgccggcgactctatttaggagatcgtcatgaaaatcgaaatcttgggtatgggttgcgcccgatgccgcgacctcgaacagcggacgcgcacggctctggccgaaacgggcctcgcggcggaagtggagaaagtcgacgacattcagagaatcatggcgtataaagtcatcgccactcccgggctgatcattgacggcgcggtcaaggccgccgggcgcattccttccgtcgacgaaataaaaaaatggatctcggagagtttgaacaaatgatccccggaagattccccgccgcgcgcggcaagctcttgtccgccctgatcccggccgctctcttgatcctggtttcggcctccgccagcggcgtccttggcgcgaccccgatggacacgacctccgcggcgggctcgaatccgccgccgtcccaggccgaaaatccggccggcccggaaagcctcgtgatcgccaccgggcgcctcgatatcgatttttccaagcacctggtgacgttcatcgagcttggagccgacaaatgcatcccctgcaaggcgatgcagccgatcatgagggagatcgccgccgagtacaagggccaggttcaggtgatattttacgacgtctggaaaaatcccgaacccggccgaaaatacggcatccagctcatccctacccaggtctttatcgacaagacgggaaaagagatcttccgccatgtcggcctgttccccaaggaggagctggtggcttttctaaaaaaacagggagtccgctgaaggtcgacccgcgaaatgaacgcgcttttcggcgatatcggcctgatcctccagaataatccttggctggcgatccccgcggtgttcctcggcggagtgatgaccgcttccaacccctgcgtcctggccatgattcccctgatgatcggcctggtcgcgggccggagcgaatcaggcggcctcaaaagaacgtttttgttttcgttgttctttgtcctcggactggccgcgacgttcaccgccctggggctcgtttcggcccttctgggccggatgttcggcgacgtcgggcgcttctggaagcccgccctggctgttgtctgtctggtcatgggggcgaatctcctcgggctatttcatttcaatttctccttccccggaatagctcgatttaaaggcagggggcttctcggctcgttggccctcgggcttctattcggccttgtttccacgccttgcgccgtccccgttctggccgttctcctggcttttgcggccgagaaggggaatgtcctcttcggcggcgttctcctcttcatttacgccctcggccattccgtcttgattctcatcgccggaacatccatgggagcggcaagaaggatgatcgagtccaagggattgaaaaaagcgagccgcggccttcaaaaagcggccggcgtcatcatcattctcgtcggggcatatcttctcgtcggataaaacgcgaaaaggagatggcaatggatgattcgcgcccgaagcggctttcatttctggaccggtatctcaccctgtggatcttcgcggccatggccgtcggcgtcgggctcggatatttcatcccggccgtcgtgggcctcatcaacacgtttcagtccgggacgacgaacatcccgatcgccgtcggcttggtcctgatgatgtacccgcctctggccaaggtgaaatacgaggagctcggcgacgttttccggaacgtcaaggttctgttcctttcgctcgtccaaaactggatcatcgggccgcttctcatgttcgccctggccgtcctttttctccgggattatccccactacatgtacggcttgatccttatcgggctggcccgctgcatcgccatggtcatcgtctggaacgagctggccaagggcgacacggaatacgccgccggcctggttgctttgaattccatttttcaggtgatctttttctcggtttatgcttatgtcttcatcaccgtcctccccggctggttcggactgaaagggacggccgtagacatcacgatcggggaaatcgcccgaagcgtgttcatctacctggggattccttttctggccggcatcatcacccggttcacgatgctgaagctcaaggggaagacgtggtacgaaacgaaattcatccccaaaatcagcccgatcaccctggtcgcccttctcttcaccatcgttgtcatgttctcgctcaagggcgagtacatcgtcaaaatcccgctcgacgtcctgcgcatcgccgttcccctggtcctctatttcctgatcatgttcctcgtctcgtttttcatgggccggaaagtcggagcggattattccaagaccgccaccctgtccttcaccgcggccagcaacaacttcgagctggccatcgccgtggccgtggccgttttcgggctcaactccggcgaggccttcgccgcggtgatcgggccgctgatcgaggtcccggtcatgatcgccctggtcaacgtcgcccttcggttccggaaaagatatttctccggggaagcggccgcctgaggaagccgacatgggagaaggaggccgcaaccgggagccgatcggcgggatttctccaaatccagccgcggatccccgccccttgcgccggtatctcaaggccggaatccgcggacgcctagatcttccgcccggattgataaaaaagctgggagcctcccccggcgcccgtttggaagtccgggcccgcgacggccgttttgagatcaagccgaatatccacagcctgtcccggctttatattgagccgacgtcccgctgcaacctggcctgccggacctgcattcgtaacacctggaaagaaccgatgggcgacatgtccacggccttgttcgggcggttggtctcccaattgaaggatttttgccacctggaatcggtgatgttcgccggattcggcgagccgaccgcccacgcggacatcctccggatgatccgggcggtcaagaccctcgggcttcgagtcgaaatcaccaccaacgggactctgcttgacggccccatgatcgacggccttcggcgggccgggctggatatgctctgggcgtctttcgattcggccggggaaaagggattcgaggacatccgccggggggcgaaattcgaaccgatcgtcgccgctttgaaaaacctccaggccggaaacgtccgcggccgccgtaaaatccgggtcggcatctcgtttgtcgtcatgcggcggaacgtggccgatctgaaacgaatggacgacctggcccgggaagtcggcgcggataaagtcctggtcagcaacatcctgccctattcagaagacatggaaaaggagatgctctgcgccctgaccctgtcgacggcgaccttttcttcggcggccaggacggaaatctccctgccccggatggacgtcgcctcccacacccgggaagccattctccatctcctccagggttacgagaacttgagcctgatgggcaatcccattttcgccgaaacgaacttctgccgcttcgtcgaagaccggacggcttttgtccgctgggacgggcaagtcgccccctgcctggggcttcttcacggctatacgacctatctttatggatacgaacgaaacatcaagccgcatggattcggaaatgtcgggcagagaacgctgggatgcatttggcgttcgcggaattaccggagattccgggaaaaaatccggaactttgacttcgccccctgccatatctgcggtggatgcaacctgctcgaatccaacgacgaagactgtctgggcaacacattcccttcttgcggggggtgcctctgggcccagggcctcatccagtgcccttgagtgaaaggaattcttcaatgaaagaactgaaaatattcgccgttctcctggctgtattcctggccgcttatttcatccccttcggccgctcctccgtccagaacgccgtccatgaagcattcatgatgctccaggaatacgcccggatgcatgttttgttctgtctcgtcccggctttctttatcgccggggcgatttccgttttcgtcaagaaagaatccgtcatccgttatctcggacccaaggcgaataagttcatggcttactcggtcgcctcggtctcgggaaccattctggcggtttgttcctgcacggttctcccgcttttcgccggcatttacactcggggggcgggactcgggccggccacggcgtttctctactccggcccggcgatcaacgtcctggccatcatcatgaccgcccggattctcggctggaggctcggcctggcccgggtcattggagccgtcgttttttcggtcatcatcggccttctaatgcattttttcttccagaggaagagggataaccctgtcgaagaagccggcttcggcctggaaaacggaaacgtcaaagaacgtcctctttggaaaaccgcccttcacatcgggtcgatgatcggaatcctggttttcttgaattgggccaaaagcgatcccgacgtcaaagcctgggacttcattttccggctgaaatggattctctccgcggccttcgccgcggctctcgtctggatgacggccgcctggttcaaaaaagacgagctcaaggaatggctgtcctcgacctggacattcgccaaacaaatcctacctctcctcctggggggcgtcatggcggccggatttcttttagggcgccccggccatgagggcgtcatccccggcgcggtcattgccggtctggtcggcggaaacggccttccggccaacctgttcgcctccgtctccggggccctcatgtacttcgccaccctgaccgaagtccccatcctccaagggctcatcggatcggggatgggacaggggccggctttggcccttctgctggccgggcccgctctttcgcttcccagcatgatcgtcatcggaaaaatcatgggaacaaggaaaaccgcggtctacgtcagccttgtcatcttcatggcgaccgcgaccggattgattttcggcgccttctctcgatagtccaaaaacgagaggagagcctgggaaacgaacgttttggaaaaagacgtttgaaccgggggcctagctgcaaaagcggccccggaacgtcctttccgggaccggccgggagggaaatgaaaagcgacggccgcctcctccagtccgagaaaaacatggcttggatacgaggagagtttgaggaggaggaggaggaggaggaggacatcgggtcggcggcggaagtccccaatcgccggttggaggaatggaattgaatcgatcgcttcgttcgtccccgccgagccttcggacatctcacgccccgtcatttttccccggtcgcatgaatctacggaagccgttcacattgacaaccccctgattttccagtattttatagaggaaatgaccttgaccctcaaccaagtgctttttctcattctcacggtcgccgccgtcgtggcgatcgttcagctcgttcgcctgtttacgcagttgcgccggacggcgatcgagggggaaaaagccctgggggagatcgccgagctggctcggcatttgaaggatctcgacctcgtcatcaaggagcaggtggaagagctggccaagaccatcgccgcgtccaagaaggccgcggtcaatgtcgccgaggcctcctccctgatctcggccaaattcatccggcccggttccaaataccttcccctcctcctccccgtcgcccagtttgtctggcgccggttcggcaagaaaaaaaaggagagtcaccatggcaagtgatggcaaaagcagcgccctggaaatcgccgtctcgtttctgatcggggcgacgaccggatttgttctcggaattctgttcgcccctgcgtccggcaaagaaacgcgcaagagaatcggggacgaattcgaaaaaggcaaggaaaaggccgtcgagggattcgagaagctctccaaagaggcggaaaaaggcattcgcaccgtccgggaaaaaacgcaggaagggattgaggtcatcaaagaattcgtcgaccggaaaaaaggcgaccaggtcaaatcctgaccggccggccgatttattaatccgtatatttcattttaaaggattggtccatgtccgcaacaacgattctgtccgtcaaagcccgtgaaattcttgattcccgagggaatccgactgtctccgccaaagtcgttctgaagggaggcgccgtgggaacggccgccgttccttcgggcgcctccaccggaacttatgaagccttggagctccgcgacggcgatcccgcccgctacctcggcaagggcgtcctcaaggccgtcggccacgtcaatgacgaaatcgcgccccgcctggtcgggaaggatgccctcgatacggccgccctcgaccgtcttctgatcaccctggacggcacgcccgcgaagacccgtctcggggccaacgcgattctttccgtatcgctggccgcggccgaagccgccgccgccgcccgcgccctgccgatgtaccggtggctccgggaacgggatcgctacacgctccccgtcccgatgatcaacattctcaacggcggggcccacgccgataacagcgtcgacattcaggagttcatgatcgtcccggccgggcggccgaccttcgccgaggccatccgggccggagccgaggtgttccacaatctgaaaaagatcctgaagaagaaaggctacggcgtctccgtcggagacgagggcggcgtcgcccccaacctcgggtccaatgaagaagcgctggattgcatcgtggaaagcatcgcccaggccggataccggccggggaaagacatctggctggccctcgactgcgccgcctcggaattctacggcgacggccgctacgtctttaaaaaatcggacggagcgtcccggacgccggccgagatgatcgctttttatgaaggcctgatggccaagtatccgatcgtctccatcgaggacggattggccgaggacgactgggacggctggacgctgatgaccgaaaccctcgggcgaaaaattcaaatcgtcggcgacgacatcttcgtcaccaccctgtcccggctgaaggaaggcatcgagcgccgggcggccaattcgatcctcatcaagctcaaccagatcggaagcctcaccgagacgatcgaggccgtggaatacgcccacgcccatgatttcaccacggtcatttcccatcgctccggcgagaccgaaaacaccttcatcgccgatttggccgtcgccctggacgccgggcagatcaaaaccggctccgtctgccgcagcgagcgggtcgccaagtacaaccggttgatggaaatcgaggaagaactcggcccgaaggcggtttacgcgggcaccggcgcgttcagccggttcatcaagtaagagaaccggtccgggatcagcggccggggccttccccggccgccgcctcggcccagccccgctcgtgccggagaagccattccttgcggttcagcccgccgccgtatccggtcagacgcccgtcggcgccgatcacccggtggcaggggatgatgatggagacgggattggccccgttggccgcccccacggcccgggcggcggccggccgtccgaccatccgggcgatctctccataggacacggtccggccgaatgggattccccgaagcgcgccccagacctcgagctgaaaggccgtgccctccaaggccaggggaacctcgaacacggtccgccggccggcgaagtattcctcaagctgacaggcgcaggcggagagaagggaaccgacccggccctcttttccgggacgccgattccggaaattcaggccgacaagaaagccgttcttttcccgaagctcgatcattccaagcggcgaatccacgaacagaacgttctctccgttcattttgaccttccgccgccgagactatcaaactccgatccgccgttcaatccttcgcctccgtccgattttcatttcccaacctcggacaagaagcggaccatccccggtttttccggaaaagagggtccgaatttgacaatccgcggctctccagattaagatgagagccggtcatgcgcaagctctttccggcaataactctattatttgcttttctttgtccgtccctttctttttccgccgtcgataaaaaaacggccgccgacatcgaccgggaaacggaaaaaatcgcggccgagatggtcaagatccggcggttgatccatatggatccgcaactgccggggcgggagcaggaaacggccaagatcgtcgccgcccgcctggccgccctcggattcgaagtgaaaaccggagtggccagaggcggcatcgtcggattgctccgcggagcccagcccggcccgatcgtcgccctccgggccgacatggacgccgtacccatccaggagctggccgatgtgccgttccggtcggtcaacggcggcgtgatgcacgcccacggccatgacatccacgtggccgtggccctcggatccgcctatgtcctcaacgccctccgggatcggatgaaaggcggagtcaagttcatcttccaaccggggcccgatcccgcctccgaggatcccgagagcggggccgcccagatgatccgggaaggagtcctcgagaatcctccggtcgcggtcattttcggattccatgtttggccggacacgctgggccaagtgttctcctcgcccggctccatcctggccgcttccgactccttcgaaatcctggtcaaaggccggagcgcccaagcttcccacccccaggacggcgtcgacgcgatcgttttggccgcccagatcgtcaatgcccttcaatcgatcatcagccggaccatcgagcccacggacccggccctgcttacgatcggccggatcgagggggggactcaatccgatcttttagccgatcgcgtgcgcctgacggggatactccggacgttgaacgacacgacccggcgaaagatccagcggctgatggaagccgcggtcaaggggacgacacaggccttcggcggggattattccctggcgttcaagcaatccatcccggccgtctccaaccatcccgagctttacgcctcgatgctcccggtcctcaacagcgtcctctccgaccgcccccttcagcggctcgccccccagatgatggccgatgatttctccttctacggaaggaaaatcccgtcgctcttttttcttctcggcgtgaggaacccgaggctttcgaccgctccgctcgaaagcccgtatttcaacccggacgagcggagcatcgcgatcggcatcaagatcatcagccagattattctggactgcctggagcagcaaagccggctggccgattcaagccaaatcgtcaaataaccgggcgatggcttatcccgttcttttcctggcgatcgccgtgtccgcgggcatcgccgccgccggttttctttctctttcccccgccgccgcggcggccgcgacggccgtcgtcctggccgccgcctggatcctgttcgcccggcggaaaaccgcggcggccttcgtcctcctcctgaccgcggccgccggcctgggcgccggcctgggttccgctttcgaagcgcgatatgaaagcaacgagctgcggagcctgccgaccggcgaatacttcgatttcacgggaacgctctccctttccccagcgcccggcttggaccgcgacgatctctatctgcgggttgaatcggtttccctccggggagcggaccgtcccatgaccggacggatccgggtcgcggtgaagcattccgcgacgggagggaagctgccccggctcatcgccggcgaccgggtccgcctatcggcccaggtcgtccccccctcagaatattggaatttcaaggcgccgttttcagttgcgtatatgaaaacgcgggatctccatgccctcggctcgacgaaaagcccctcgctggttgaacacctcggcccgggccgccggagcgttccgttccggtggatttcgcggctgcgccggacctgcctggacctcatcgagcggtccttcgccgatcccggacgccccggaggaatctcccccgaaggggccgttttcgaggcgctcgtcctcggagaacgctcccggatggacgaggcgacgacccgagacctccagaaatcgggcttgttccatctgttcgccatttccggcgcccatatcgccatcgtctccgctctccttttcttccttttccgggcgttccggatcgccgaacggccttcctatctccttcttctcctcctcctggtgttctacggctttctcgtcgaggggcgggcttccgtcatccgggcggtcgtcatggccgccgccttcatcatcggcaagctcctttggaaggatgtccatctcctcaacacgatttccctcagcgctctgggcattctcttcgtccggcccttccagcttttcgacgcgggcttccagctcacgttcgccgccaccctcggcctgatcctcttcttcccttcgatccgggccgcccttccccgcctgcccttcaaaatcgaggagctcttcgccctttcggtcgccgcccagatggccgtcctgccgatcatcgcggcgacgtttcaccgggtgattttctcggggttgatcctcaacctgatcggcattcccctggtgaccgtcgtgatggccgccggatacgtttttctccccctgtccttcgtttttccctttgccgccgggatcgcggccagcggtctttccttcctcctccggattttgctggactcgacccggcttttggacggcctgccgttcctctccagccgcgttccgacgccgcccggaccggtcgtggccgcctactatgtctttcttctccttcttctccttcccgcccggttcgtccgcctccgccggttttccttcgccggcttcgccgccgccctcatcgtcttgacgacgcatccgttcccggcggacgtcaaggacctgaccgtcaccgtgatcgacgtcgggcaaggcgaatccgttctcgtcgaattccccggttcggagaaaatgctcgtcgacggcggcggactgccgacgggaacattcgacatcggggagcacgtcgtatccccttttctctggaacaagggaatcaagaaaatcgaccgtctcgtcttgacccatcctcacccggaccatctcaacggcctggcggccgtcgccaggaatttttccatcggggaattctgggaaggaacgccggctcccgaagacgcgcgttaccgcgccctccgggaagaactcggcggcgttccggtccgcggagtcggccgcggattcaatcataacctcggaggagtcgacatcgccgttttagccccggccgaaacctccggggcgaaagcccccggcaacgactcgtcgatcgtcctccgcctgatctacggctcgacggcctttctcctgacgggggatatcggccgggacgtcgagagggaaatcctggccgccggcttcgatgtccgggcccaggttctcaaggcgcctcatcacggaagcgattcctcgagcacggaggaattcctggaggccgtccgtccggaggtcatcgtcgtttccgccgggcgcggcaaccggatgggacttccccaccccgccgtcctggaccgtttcgggaaatgcggagctcgggttctgggcacagatcgacagggagccgtcgagatccgaagcgacggccgggaactctccatccggacgtcccggcgatgaccgccggccttttgccgaaatcgagcatttgacttgacttgtctctcgttttattattagaaaagaaggatgaagttcagaaaagcggttatcgcggttgttcttttagggatggcggcctccgcctcggcccaggatctggccgccgccgcccgaaaggaaaaggaacgccgggcttcccttaaaggcaagccctcggtcacggtcaccaacaccgatctgaccaaggcgacaaaaaaagcggccatcagcgaaacccggaccgaggacggagaacagacggccgcagccgagggagctccggccgagcctgaaatgaaaccctcggccgtggcggccgaaccttcccaagccctcgtcgtcgaaaccgccgttgacgtcgagggcctccgggccgatcttcaggacaagtacgaccgggccaaggaacgcctggagtacgtcacgttaaagatgcgggccctccagcagcagttcttctctttcaacacgatggaatccaaggccaaggtgcagcaggacatcgcccaaacgaacctggatattcaggcggccgcggccgaggaagcccggctcaagaaagagctcgaggacttcgattccaagaatccgggcaagtgagggcggttccgctcctcaccggaaataaataaaggaaacctgaagcccgagttcgcgcgcgtccttggaagccggtcggatatccgccggaataaacgaagggttggccccgatggacaggatgaattcatccttgtcccccagcatttccttttggatccggtaggtcttctcgaaaaggctttcgcccggaatgaactcatcaaccgtcaaatcgttgattttaaagatgatcttttgatccttgacgtcggcgatattcgccgctcctttaatgaccaggacggcgtcccggcgcggattatcgatgatgcacttggcttccttggccgtccagcgccactgcttgaggggcgcgttctgatcgatctcgaggtcgtaccagccgctctcgtagatgatctcgggcgtgccgatcggcggcggaacgactttgagcttctggatcaggacctcgcgggggggatcgccgctccggtcgaagggattgaccaggccgacggagaaacggagtgtctcctcgcccttgaactggggattgaattcatcgatgaatttggggatgaagatccgccgggtgatggtgtaggtcttgtccggttcccaggaggacgtgggcggcgccggagcgtgatcgtcctggagaatgagattgtcgttgtgccagaaatgaacgaagacgtggtagtcccggctgaatttctcgaaatccttgccggtcttccacgtgtatgtgacctcggtgatcaggttgtccgtcaggggcgactcggcgaaaacgacgtcgagggaaacgcccttgatcgaggtcttcttttggcagccggtcaggaccaggaccgccgccagggcgaatatccaaaaattgaaccgacgtttcattgatcgcctcctagaatgagagatacacttggccgaattatagatgattcgacaagccaagtaaactcaaaagggggaccgccggagcaagggtgtctgtccgggggagatatcggcattacagccgttctatgatatattctgccgcaatgagaatccttctccgggtctattccctggtttcccgccccgtctgcgccggcaaggccgcccggtaccgccgagggcggaaaacgccggcccgcgcccctcttccgatcctttcgatcggcaatctcacccttggaggagaggggaaaacgccgctggcctgcgaaatcatcgctcattttctccggaagggatggaggcccgccctggtcagccgcggataccgcggcgcttgggaacggtccggcggcgtcgtgtcggatggaaaaacgtttttcggcggtttccgagaagccggcgatgagccggttctagtcgcccgccgctatccccgagccggtgttttcgtcggccgcggccgcctcgcgtcctgccgcgcggcggcgtccctcggtttcgatttctgcgttctcgacgacgcgttccagcgtctcgacctcgcccgagatctcgacatcgttcttcatgatccgcgctcttcgtcgcctcgaagggaaggcgaccgggctttggcccgagccgatgttcttctcctcccccgggggacctcgccggaacggtttgaggcctatcggcggcgcttcccgcgcttgaaggttttcgaatacgccgccgtcccccgcgggcttttttcagcggacggacaaacgggcgttccgctcgaagccctttccggaaaacgcgtcctggcattcgccggcatcgcccgtccccgccgcttcttctcccagctggaatcgctcggagcggctgtcgtcggccggatgaccttccccgatcatcatttgtatccggcggcgtcccgcgcccggatcgcggccgcggtgtcccggacggatcccgagatggtcctgaccacggaaaaagacgcggtcaaattcgaagcaggggagctcccctgggaggggccggggctgaccgttctccgcatcgggctcgacctgccggacgagtttttcgaatgtctcgaggccgccgtttttccgggaaaggccggtcatgcctaagcgccgcccggattcctcgtccgtcggaatccacctttcttatgttctgtatcgccttttcgcctcattcgtcgcccggctcccgcggcggatcgttcttcttttcagcgaagccttgggagccctcgtctatcacttggattccaggcgccggcgcatcgccctcgacaacctgagccgggctttcggccgatccctttcccatgaagaccgccggcggacggcccgccggtcgatgatgaatttcgtccgttcccttttcgacatcctgaagaccgccccctggcccccgggccgggtcgaagcgctgatcgacgtccaggggaaggaaaacctcgagaccgccctcgcccgcggacggggcgttctctttttcacggcccacttcggcaattgggagatggtcatcacgcccatcgcccgccgcgttcccttccatgtcattgtccgagcgctggacaatccgctcatcgaccgggagttggaaagcgtccgggcccggcggggagcaaccgtcttgaacaaattcggggcggggcgtccggtgctgagagccctcgggcggaagggcgccgtgggcattgtcatcgaccagaacgtcctccgccgggaggcggttttcgtggatttcttcgggatcccggcggccacgaccccggcgttggccgtttttcatctccggacgggagctccgatcgtcccgatgttttgcgttcccgccccgggagaccgctaccggctgatcttcggcccgcccgtcgatctccctctcacgggagacgaggcggtggacgtgttgaaaatcacggcggtctgcactaagatgatcgaagacgccgtccgccgcgatccggattcctggttgtggattcataaacgctggcagtcgaggccccatgatgaaaaatcctaatctccgccccgggcggtccggaagccgggcggccgatcagatccgcccggttaaaatcacccccgattttatcgaagtcgccgacggctcggccctcatcgaaatgggacgcacccgggtggtggccgcggccacgatcgaggaaaaagtccctccgtttttgaaagggacgggccagggctgggtgacggccgaatacgcgatgctcccccgggccaccgagaaacgaaccccccgcgagcgccagatgggatacccgtcggggcggagccaggaaatccagcgtttgatcggccggacgctgcgggcggtcaccgacctccgggccttgggcgaccggcagatcatcatcgactgcgacgtcctccaagccgacggaggaacgcgcgtcgcttccatcaacgcggcctccgtcgccctggccctggccctgaagaagctgctggacacgaagatccttccggttctgccgctccgccacctggtcggggcgatctccgtcggaatcgtcggcggcgacgtcctttgcgacttggactacagcgaggacgcggccgcggagacggatatgaacgtcgtcgaaaccgatcgcgggcagctgcttgaagtccaagcaacggccgaaagggttccgttctcgcgtcatcagctagactctcttctgaagatggccgacgccgggatcgtcgaagtcatccaggctcaaaaagacgttctgaaaaagaaaagccttatgttcatggcctatgggcgctgaatccgcggctttttcttccgtcttgacaaccgcaaacgcgctttatatcatgcgtttttaatcagttatggagaccgccatactcgctgcaaacgtcctttagggaggttgccatgagtctcgtcgccattctcatcctggccggagccgtcctcgccctgatcgttcttttcggctttttgttcgcccgtcaataccggaaggtcggtccgaacgaagccttgatcatttccgggcggaaaagaaccgtcgccctgcccgacgggacggcgaagaaggtcggtttccgcgtccggatcggcggggggacattcgtccgcccgttcacggaaaaagtcgacatcctcccgatggacgtcattccgatctccatccgcacgccggaggttctgacccacggcggcgttcccatcgtggccgacgccgcggcccaggtgaaaatcgactcctccgaggcgtcgattcacacggccgccgagcaattcctggggatggggaaagaaggagtccgggacgtggccgtcaacgtcctcgaggggaagatgcgggaagtcatcgggacgatgacggtcgaggagatttaccgcggccgatccgagttcaaccgccgcgtcggcgaagccgtccggtacgacttcggcaaaatgggactcgtcctcctgtccttcgccctcaaggaattcggtgatacccagggatacatcgacgccctgtccaagcccttgatttcggcggccaagcgggacgcggccgtggccgaggccgagaccgagaaagaggccatcatccgctcgtcccaagcccggaaggaaggcgaggtggcccggcttcaggctgaagcccagatcgccaaggcccaatgggaaaacgaagccaaaaaatccgagtcgctgacctgggtgaaccagaaaaaagcccaggccgacttttcctatgagctcgagcgccaccgcctctcgcaggaattgaagcgggaggaaagcaaggtccgcttggtcgagaaagaacaggccatcaagatcgaggagctggaaatccagcgccgggagaaagaactggattccaacgttctcaagccggccgacgcccggaagtaccaaattcgggcggaggccgaagccgaggaataccgcatccaggccgaagcccggggcaaggctgaggcggtcaagcttgaaagccaagccgaagccgcccggatcaaggagaagggcgcggccgaggcggaggccttgacgaagcgggctcaggcgatgaaccattatcaagaggcctcggtcctcgaaatgtacatgaacgtcctgccggatgtggtaaaaagcgtggccgagccgctttcgaaaatcgataagatcgtcctggtcaacagcgacaaggatctcggcgtctccaagatctcggcccaaacggcccaaatcctggcccaggtgcctgaaatccttcaatcgctgaccggagccgatttaaagaaattcctcaaggataagctgaccgccgaaaagaagagcgaaaaatagcccccgcggccgcttgggaaaggggaaatcatgatttccgacaaagccaaccgcatcggctcctcgccgacgttcaaggtcagcgccaaagccaaggcgatgaaagccgaaggcctcgacgtcgttgacctgagcatcggcgagcccgattttccgacctccgaatccgtcaaggccgcgggaatcaaggcgattcaggataactacaccaagtacacggaaaacgagggctctccggccctcaagcaagccatcatcggccggctgaaagaagattacggcctgacctacgctcccaacgaggtcatcgccaactgcggagcgaaaagctcgctgttcctcgccttccaagccctgatcaacgacgacgaggaagtcatcatccccgccccgtactgggtttcctatccccatctcgtgaatttggccaaggggaagcctgttttcgttcccacaaaggaggaaaacggctttatcctgacggccgaggagctcaaggcccgcattacgccggcgaccaaggcgctgcttctcaattccccgtcgaatcccacgggggcggcttatactctcgcccagcttgaagccctggccgaggtcatccgcggggaggatctctgtgtcgtttccgacgaaatctactcctgcctcgtctatgacggatttaaataccgaagcatcgcctcccttggggacgacctcaagaataaaacggtcgtgatcaacggtgtttccaaagcctatgccatgaccggctggcggatcggatacgccgccgggccggctcccttgatcgcggccatgagccgcattcaaagccacgccacttcacatcccgcgtccatctcccagcgggccagcgtcgaggccttagccggatcccaagccgacgtcgcccggatgcgggccgagttcgagcgccggcgcaactactccctgatgaagctccgaaccatccccggcgtctcctgtttcgagcctcagggcgctttttatctttttccgaacgtccggtcgttttacgatctggaattcaacgggacgcccatccgcaactcctacgggatggcgtattatctcctgcgggaagcccaagtggcgatcgttcccggcgacgcgttcggagccgacgatcatatccggatttcctacgccacgtccctggagaacctggaaaagggactcaaccggatcgccgaggccttggcccggctcaagccggcccgcaaagccaagcgcgtcgccttgaacaacgtcgtcacccgggtgcgcgggccggttccggtcgatccccgcctgccgctgaatcaacgggacggcctgacggccgagacggaagcccggctggccgccgatgttctcttcgaatggaacgcggccgtcgccggagtcattctccgcctgaagaccaacctccgccacgtttacgagatgtgggtggaaaactggacgccggcccccgcggaggccggcatcgagccgcacggcgtcttgtacgcagtcgacggcttggccggccgagatccccgggccttcttcaacaccgaaacgaagaccggggtcgtcgtcaactgcgattcctatgctcccgtccgaagcctggccctgggcctggccggcgacgtggccggacgccacttcggctcctgcctgatccggggaatggcggtcgaccgggagggcggcggagtgattctcgtcggcccggccggaacaaagaaaacggatcttttcttcagccttctccgggatccccgcttccgcttcgtatccgccgacatgatttcggccaggccggccggcaaggcggttcaggccgaggcgatcgagcgcaaggcctggctgccgacgaacacggtcgagctgttcgggcgcctggcccgactcttcgaccggagcaaatgcgaaaacgtcgtcatccggaaggaagactgccccaatgccgaatgcctccgggccgaggattgccggctcgaccggggcgggccgttctgctacaaggcggccaaggacgcccgcgccctgctggatccttcctggctcggtccgggggcggccgtccgccggacgcagctccgctggctgtttgtcctccgaaacgactcggtctcgccggcgctcgaggagttgaatcccgaggatgccctccggattcttgaaaggggagaaacgccggggatcaagaaatcggctgcggccgtccccaagccgtttttcaacgcgtcttttcttgcctcgacggaggagcggatcgagatcgaaaaggatctcttccgccgtctccttccgaatctccgaacatttctcttcaactccggggcggccggcgtggacaagatcaaggagacgatcggcgggtaagacggattccggccggacggaccgggcctcaagaagacggatacatcctctcttcgatttctccggccaggacatgcaaaaggaagaggtggatctcctggatccgcggggtttcggtcgagggaacgtccaggagaaggtcggccaggggggcgctcttgccgccgccccggcccgtcaggacgatcgtcagcaagccctgctccttggccgttttcaaggcggttaaaacattgggggagttgccgctcgtcgtcaaggccaggacgatgtcgcccggatcgccgagggcctcgatctggcggctgaacacggcctcgtaggagacgtcgttcccgatgcaggtcaggaccgaggtgtccgtcgagagcgtcacggcccgcagggccggccggggcttgaggaatttgttgacgagctcggcgacgaaatgctgggcctcggccgcgcttccgccgttgccgaaggcgaggattttccggccttttttcaaagcactgacgcaggcctcgatcgctccggcgaacgtctccccccgggcgacgaaaaattcgtcgagcatccggctccaatcttgagcgatgcgttgatggtccatgactctcctccttctcaggccggaaaagacgacagcctttcccggacggcgctcatccaggcttcgaattcgctcgatcccggctcgggatcggcgaccggcggatggaaaaagacccggatcgagccctttcccggcaccaatctccctttcggcatgatttcaaacgttccctcgatcgaaaccggcgcgattggaacgcccgcttctcgggccaagaaaaatccgccccggcggagcgtctgaagacggccgtccaggctccgggttccctcgggaaagatcagaaaggaacatcctttctcctttatggcggccgcggcccggccgacggccgcccggccgccttgggttccgctccggtcgaccgggatgaatccgatgattttcatcgccaatccgacgacggggatgcggaaaagagacgtcttcatgatgaccctgacgggtccccgaatcaaccggaaaaggagcggtccgtctaaaaggctgacgtgattggacatgtagacgaacggtccgtcttccgattcaggaacccggccgaaaacgtcgacccggaggccgaggacggcccggctcgctcccatggcccactttccgatgcggaccaaggtttctcgaagaccgagcccggcggcgaaaagaagcccgggaatgagacaaaggatgatcccggcataaaaaagaagaagaacggccgtccggataatcatcgggccgattataccccaatccgctgggcgagaaaaaaagagagcggcggaaaatcaggtgccgacggccccggcccgagggccgcggatgaacgcgccgttgaagttgatcaggtccttgtcgaagtcggccgccgcgccgatggagtacaagccgctgtcgggcgtggccggattataggtccaggattcgagggtcttgtcgcggccgtaggaaatgaccaagaaatcatccgccccgggggcggagattccgtattgggtgcagttatcccccgtgaaaatcatgaacggctggccccactgatccatgttcgggaggaccttgagataaaacggtgatagcgccgtgttgaccgcgatgtcgatcgagccgttggccgggggcggaaacgtcttgtccgagatgaagccggcgatggccgtggcgatcgcgctgatgtctttctgcgttccccggaccttggctttctgaagggcggtcatggcattgggtatgagaagggcggccaggatgccgatgatcgcgacaacgatcagaagttcgatcagggtgaaaccttttcttgcctcggccatgataatctcctcgttcgtccttaaaacgggattcgacccggatttttcgtttcatttgattcttagcaaaatccgtgccagcggccgcccgggcgaaggaagggaaaaaagagagagagaaggaaagcggcgcggggaactccccgcgccgcctcaacgattccgaacgaatgagaattaagagccggtcgcgcccgcccgcggtccgcggatgaacgcgccgttgtagttgatcaggtccttgtcgaagtcagccgtggctccgatcgaatacaagccggcatcgggcgtggtatcgttatacgtccagccctcgatggttttgtcccggccgtaagaggcgaccaggaaatcgtccacggcggcggaagagatgccgtactggccgctgacgttggtcccggtgtaaatcatgaacgcctgaccccactggtccgtctccggcagaaccttcaaatacaggggagacagcgacgttttcacggtggagtccatcgccccgttggcggtgaaggggacagccttgtccgtgatgtagtcggcgatgccggtggcgatcgagttgatgtccttctgtgtcccgcggactttggccttctgaagggccgtcatcgcgttggggatgaggagggccgccaggatgccgatgatcgccacgacgatcaacagctcgatcagggtgaaccctttccgattcttgaacattgaaacctcctgcttcctggcggtttttcgaagccgccggaattcgaaaaatttttctttgcataatattatcagcaaaatgcatgccaataatgcgtagattctaaatatatgaatataaataatatatgtcacaaaggaaatgaaaaaagacggaatattgacattatttgtcaacgaagtgtcgtttattgccccgctcctccccccgttccctgtcaagaagcccacaggctttgcttgcgttttcctctattccgcggcgcccggccttctgatttgatattttttcatcaagtagcgaagagaccggtagctgacgcctaaaagctccgccatccggcgcatgttgccggcggctttttcgctcgcttccttgagataagcttgggccacttgatccaggtgggcttcgagatcgaaaccgggcaaaagaaccggcgcccctcccaccggcgcccgtccggcttcgacgacatcgtccgggagactctccgccgtgatcgtttcccgctcctcgaccgcgcaaagcctctcgatgatgttttccagctcgcggacgtttcccggccaggagtacttcgtcaaggcggtggtgacttcgggagtcaagcgcttgattttccggcccatccgctcgcaatgcttccgaaggaaatgctggatcagcagggggatgtcatcgggccttcgacggaggggcggcatgtcgacggagatgacgttcaggcggtagaagagctcctcgcggaatttcccctcttcgatccgcttgcggagattctggttcgtcgcggcgatgatccggacgttcaccgggatttcctcgtttcccccgacccggcggatcatccgctcctggaggacgcggaaaagcttgacctgggtccagggcgacgtctccccgacttcgtcgaggaaaatcgtcccggcatgggccgtttcaaacatccccttcttgtccgagatcgccccggtgaaggatcctttcacgtgcccgaaaagctcgctttccaggagattttccggcagcgccgcgcagttgatcgaaacaaaggcccgatcgcgccgccggctgttggcgtggatcgcccgggcggccagctccttccctgtcccgctctccccggtgatcaagaccgtggaatccgtggccgccactttttcgatcagggtgaagacctcctgcatcggccggctcttgccgatcatgttctcgaagctcgtctcctcccggagcgcctgcttgagaatcttgttctcctcgaggagccggcggtgctcgaggccgttggccacgaggaccttgatctcctcgatgtcgaagggcttcatgatgtaatccatggcgcccagccgcagggcttcgacggcttgcttgacgctggcgtaggccgtgatcatgatgaccggaacggtgggcttttccgccttgacccgccggagaacctccattccatcgacctgcggcatcttgatgtcgctgatcaccaagtcgaattccttctgctcgatgtcctcgtaaatgctgggcgttccgggattgacgaggacggcgtatccttccttcttgaggatgacgctcagcagctccaggatcgagcgttcgtcgtcgacgatcaggatcgtgttcatcggcaatccgcggccccggagttgcccttcgcgccgaattcacggtagggcagaatgatcttgatgtccgttccgacgttgggctcggattggacctggatcttgccggcgtagctctcgatgatctgccggacgacggacatgcccaggccgcggccgccctcgaaccgcgtgtaaaacggctcgaacatgcgggctttttccgcggccgtcatgccccgccccgtatcgacgatccggatggccagggcgtttttgtccggacggaaaaaatcgatcgacagcccccccccgtcgggcatcgccttgagggcgtttccgaggagattccagaaaacctgcttgaactgcccgggactgccgaaatacaagaacggcgaggcttcgtaattccccccgacggcgatccggtcggacatttctccgctcatccggagcatcgtcagggtctcgaccaacggatcggccagccggaacaccgagtacgtctgctttcccgggctggccaggcagagaaactgctcgatggactgggagacgcggtgcgattccttgaccacgatatccatcaagcaggcttgttccccgccgagatccaagtcgttctgcaaaacctggaccgccccggaaatcgccgccagcggattccggatctcgtgggcgatgaacgccgaagcccgcccggccgccgcgtcccgctcccggatgttgatttcctgctgggccgcgtccagctcggcccgcgttttttggaggctcgaggacagtttggcgatcaagacggcgatgacgccgaacagcccccaggccatgaacaccgtgtagagcacctggccgatctcgatttccgctccctggtcgggccggaaatagagaatccagccgtacgccaggctgtcggcaacggccccgaaaacgatcgctgaaaaggccgcggtcatcaaggccgcccggcctcccaggaccaagccggcggcgatgatcgcgaagacatagagaaaataaagctggccgccgacgccccccgagatatagaccagtccggtgatgaccgcgaggtcgatcaggatctgggcgtaggcttgggcccggtagcgcgtgttgaacagaagcagcaggaaaaacacgagacccgtggcgtactcggtcacgatcaggaaatagaacggggacagcggcaaaaaagaggccgtggccagctgaatcacgaccgccgcgacgaacagcgacgtgatcacgacgagccgccagatgagaagccagcggacgttggacttgagggtcctcatcgccggattattgaatctggcccatcaggctgaagatcggcagatacatcgagatgatcaacgtcccgacgaggccgccgatgaagaccatcatgaacggctcgaggacggagagaagcgttccgaccgtgttgtcgacttcgctgtcgtagaagtcggccagcttggtgagcatcttgtccagggtgcccgtcgcttcgccgacgctcaccatctgggtcatcatgaacgggaaccggccggtgcttttgatcgaatcggtcagacttcggccctcggtcacctgttttcggatgtccatgacgctcttttccaggatgacgttgccggccgtggtcgccgtgatcttgatgctctcgagcatcgacacgccgccgcccaggagagtgctcagcgtccgggtgatccgggagatcgcgactttcgtcaacagcgatccgaacaggggcaagcgaaggagaaggccgtcggtcgtccaccgccccccctgggttttccggtagtagcggaagagaaagagggctccgaccgtccccaggaccaggaagaggatgtacttctggacgaattcggagaggttcatgatgaacgccgtcagccccggcagctgggcgcccaggtcgacgaatatttgggcgaacgtcgggatgaccttccacaacatgaaaaccgcgacgataatggcaaaggcgaaaatcgccacgggataggtcatcgcctgcttgaccttagccttcagcttgaccgagttttcgatgtaatcggccagccgctgaagcatcgtgtccaaggttccgctctgctcgcccgaggcgatcaggttgcagaagagatcgtcgaagactttcggaaacttgcgaagagcctggtccaggctcgaccctgcctcgacttccgcccggacctgggtgatgacccgcttgaaataggcattgcgggtctgttcggccatgatgttcaagccctggatcaggggaagctcggcgtcgatcaggacggccatttggcgggcgaaaatcgccaggtccttctgcttgactttctcccctttcaagaacggcaggttgaatttcccccggaccggggagatcttctcgaccttgatctgttcccgttggagaaggcgggccaactcctcggcgttggcggccacccgctccccctccactccgtccccgaacttgttggtgcctttccaaatataaaccggcatcgtttccctccgcggtcagcgtttgaccgccactcccacgcccgccgcccgccgctggatcaggtcggtcagctcctcgggattcgacgtggcggacatggccgtctcgagcgtgatgactttccggcaatggagatcgcagaggttctggttgaacgtcagcatgccgaacttttcctggccaagctgcatctgggaatagatctgatggatcttgttttcccggatcaggttgcgaacggccggattcggaatgaggatctccatcgccaggacccgccctgttccatccgcccggggcaggagcgactggcacatgacgccttccagggacatcgagagcatgacccgcgcctgggcttggtactggggggggaagatgtcgatgatccgggagatcgtctccggggccgagttcgtgtgcagagtggaaaaagtcaagtggcccgtctcggcgacccggagagtggcctcgacggtttcctgatcgcgcatctcgccgaccagaaccacgtcgggatcctcccgaaggaccgagcgaagggcgttggagtaggagagggtgtcggacaaaagctcgcgctgattgatgagcgcctttttcggggtgaagaagtattcgatcgggtcctcgatggtgatgatgtggaccgcccgctcggtgttgatgtggtcgatcatgcaagccagggtcgtcgacttgccgctcccggtcgggccggtgatcaaaatcagtccgcggggcagaaagcagagctgggcgatgcgggaagggatgccgagccgctgaaaactccacatcgacgggaggaagcgccggatggccgcggccacgctgcccttctgcatgaacacattcgcccgaaaccggcccagatccttgacgccgaaggagaaatcgagttccattttctcctcgaacagctttttttgcttgtccgtcaggatgctgtagacgagctgcttcgtctccgtggcggtgaggggcggatgggagatggacttcaattcgccgtggacccggagacggggagggaccgaagtcgtcaggtgcaggtcgctggcgtcggcatcgaccgccatcttgagaagctcatgcatcgaaagcggcatcgaatggctcctaatctcgcacggtttcgcgaaggacttcttccggcgtggtgatgccggccatgatctttatcaatccgctcctccgcatcgtgatcatgccggcctccacagctttttgcttgatctccttggattgggctcgaagaaggatcatttcccggagggtcggattgagttccatgacctcgaacagagcggtccggcccttgtagcccgaattatggcagatatcgcacccgcggccctgcatgaccgccgccttttcggcttcctcggaggtgaagcccatctcgaccagcgatttgaccggcagcttcgtcggagcggcgcatttcttgcagacgcggcggaccaagcgctgggcgacgacgagagcgagcgagtcggcgatgaggaacggctcgatattcatgttcatcagccggtgaatcgtggccgccgagtcgttcgtatgaatggtggaaaagacgaggtggccggtcagggcggccttgatggccacgtcgacggtttcctggtcgcgcatctcgccgatcagcatgatgtccggatcctggcggaggaaggcccggagggcggcggcgaaattcaggttgatctcgtcccggatgttgacctggttgatgccggggatgtaaaactcgaccggatcctcggccgtcatgatgttcttttccatcccgttgagcgtcgagatggccgaatagagggtgttggttttcccgcttccggtggggcccgagaccaggatgatgccccacggccgggcgatggcccgctggaagacggccagcgactcggactcgaagccgagcttgttcaggtcgatgttcaagttgtcccggtcgaggattcgggcgacgattttttccccgaaaatcgtcggcaggcaggaaatccgcatgtcgacttctttcttcaccgccttgtccagcttggcccgcatcttgatccggccgtcctggggcaggcgcttttcggcgatgtccatgttggacatgatcttgacccgggaggtgagcgggttcttgaacttcaagggcaggttcatggtttcatagagaatgccgtcgatccggtaccggacgcggaaagacttctcataaggctcgaagtgaacgtcgctggcgcctttcttgatggcttcgacgaagatgttgttgaccagggtgatgatcggcgcctcgtccggaacctcctcgatctcctcctcgtcgggctcgtccttgatctcctcgagctgatcgatggcgctgattttcgaatcgtccgccagctcgatttcctcgatgttcttcttcacccggagggccgtgcccgcgccgtagtacttgtttatggcgttgaggatgctgctttcggaagcgatgaccggctggatgctcagccccgtccggaaacggatgtcctcgatgacgtccatgtcggtcggatcgaccatggccagggtcaggaatgatcgaatccggtggatcggcatgatcagcgatttcttggccgtatcggccgtgatcaagctgatgacatcgggatagacctcgaactggtccaggtcgatgtagggatatccgagctgccggctcaatccctgggccatttcctcgccgctgacgtaattgagagagacgatggccgagctcaggagaatgtcgtgttttttctggaaatcctgggcggttttcagctgttcagccgtcaggatcttttccttcagaagaacgtcgccgattgtcgaggccattggcaacctcagtgtatcatgtttatccgtattgacaaataatgtcaatcgccgggggcgcggccctcccttttatagaaagacgcttttcaccccccaagattatcgtctgtttacccgttccaggtcaatcgttcagccggcgggagaaaaagccggatccccgccccgctttgcccaatccggccgaccctctccggccggttcgtcaatccccccgggggaaggagggcgcgacggggctttttttcctccaggccttgcggaccaacaggcagatcgaaagaatgatcaaggccatgagaagacgggcggcccaaagataggggcgccgctcggccggttctcccttcatcaggaatttgccgacggcgtcctgccaggtccaaacgccgaggataaccagcatgtaagcgggggtgatgtacttcaggatgaatttgaagacgcccgggattttgaaatccgcgcccttgtgcatctcctcccagccgttcttgaggccgaagatccaggagaacacgatgatctcgagcgctccgaacacgacgatgccgaacgtgctgatccaaaagtcgaactcatccaggacgccgaaccggaagaaaaagacgacgaaaaggacggccccgatcaggaacagaaagctgcggttgaccgccttcttccgggaaatatggaattcctcggtcaagaaggccaccagcggttggagaaaagccaccgatgtcgtgatgccggcgatgaaaagaaggaggaaccacatcgccccgaacaactggccgaacgggatcttctggaagatgaggggaagagagacgaatcccaggtcgaaggccccgccccgggcgataacctcggtttgggccaggccgaaaaaggcgacggccacggggatggcgatcgtcccccccaggacgacctcggcgaactcgttgaccgtcgacgtggccaagccgttgagggtgatgtcctggttttcccggacataggaggcatacgtcaggatcatcccctggcccaggctcagggtgaaaaaaatctggccggccgcgaccagccagaccgagccctgggtcaagcggctgaaatccggattccacataaaacccatgccgttggcgatgttccaatcgggatgggccggatcgggagtgccgagcgtcaggacgcggatgacgagaatgacgccgaagaggaaaagcaggggcatgccgtggcgggccaggacctcgattcccttggagatgccccggctgagaaagaagtaattcatcgccaagcagacggccagaaagagtaaggcggggatgagcgaggaaaaataccggttcgactcaacgccctgaaatccttttagaaaggaggacatcgcctcttgattgaccagcccgaaatatcgtcccgtcgccgaaaaccaagcatagcccaaacaccaagccatgatgaacaagtaataaacggccaccgcgaacgggatgaaaatgccgaacgccccgatgtacttggagaacggatgcttccacatcacctggaacatccccgggcccgagccgtggccgtgggctccgccgtgccggccgatcgtccactcgacccacatcatcggaacgcccatcaggatgagggcgcagaagtacggaatcaggaaagccccgccgccgttggaggcggccttggccggaaagcggagaaaattgcccaagccgatggcgtttccagccatggccagaaccagtccgatgcgggtggcccagcggtcgggccgcccgcccggccccgtttccacgaccgctttcttcttggtgaaaagaacacgggacatgcaataaacgcttaagccgaggatgacgccccagccgcaaatgaaggagatccagcccgggagagagaggccttgattcatgtcgccctccggtccaacggcgtttcggcggacatcataatcccaatggggaaaacgtataccaaagcgccgggccgttgtcaaagcggccggggaaaaccgcgcctctttatttttcctttacttatctaattatttcctttacaatccggacgaattaggcgtttttgggtcgagatttaaagacggcttttcgacggaaaaggtcaatttgaggaccctgaagaaaacgattgctctccgcccgcccatcgatccccgctttccgttccctcgctcaaacaagaacaccaaaccggccgtcctcgggctgtttattctttctcacaggagcgccttgaatgtctgaaaaaacaccgccccccgatccgatacgcccccgaagccctctcccgaaagacaatcgaacaggaaacgaccggcgcggaagcgaccgccgccgatctcaacaccaggccgttgaatcggagcgccggatcggcgaccggcggaagcacgaccggcgcgtggaaaaaacgtctccctatcacaacttggtccggttcttgaaggaaaagggattatatccccacgaaaaagcctacgaccagccggacggggccgaggtcgtttttcgggggaaaagcatcctcagcctggcctcggtcgattatttcaatttcgcccagaacccggaaatcaaaaagaccgcctgcgaggcgatccgcaaatacggcgccggtggattttcctcccgcctctccatgggaaacttgagcatccacatggaactggaaggggcgctggccgaattcatgggcaaggaaagcgtcctgatcttcaactccggctatctggccaacttggccctcatcacctcgcttctcccccggaacgcgacgattttcctcgaccagaaatgccatttgagcatccaccacgcctgcctcatgtcgcagaaaaaatatttccggttttccaacaacgacatgagcgatctggagcggctgcttcagaaacaccgggacgagccggaaaagtggatcgtcactctgggcgttttcagctccaacggtcttttggcgaagctcgacgaaatcgccgtcctggcccggaagtacaaagcccgcattttcatcgacgacgcccacgggatcggcgtgtatggcgaccggctgcgcggcgcggccgatcatttcggcgtgctggacgagatggacttgatcatgtgcccgttccagatggccttcgggaacatcggggcgttcgtcgtcggcaagcgctatctgctccaggccgcccacaccgacgcgtggccctacatgttcacgtacaacatcccgccggtcagcgcggccagcctgctgaaggcgctcgagatcctcggccgcgaaggccgggagtatcagaaaaagctctgggaaaatgtcgcttacctccgccgggctttgacggagatcgggtacaagatcctcaatccgaacggacacatcatcccgattttgatcggagacgacgtgaaagtctgcgccttcgcccagcggctgttccatcaaggcgtttgggttcagccgttttattatccggcggtccccaagggccaggccaccgttcgggtcacctgcacggccggccacacccggtcggagctggatcacgcgatccgcgccttcgccgatgcctctctctggctcgcgaactcctgaactccatgccgctcaccgcttttctctccgcgttgctatgtctcttgaccggcgttttcgtctatatcaaggggaaaaacaatccggtcaaccggtatttccttgttttcaacattctgatttttttctggaacagcggcgacttcgtcattcccctgatgggcccgcggatatccgccggattgatctacgaccgcctctcccagatcggggggatcctgatcgccccctggttcattcttttctatttgacgttgacgggcctgagcttcagggaaatcgtccggacgaagatcttccgcgttttcgtcgccgtcgccgtcctccttctttttctggcgccgacgccgctcttgatcgaaagaatccaggtggagccgttcaaagaatttccgggcaaactcctttacgtggaaatcacggccgtgttggcgagcatctttttcggcttgaggcacttgttcatcgcccggaaaaccgtcaacctggcccaacgagtccgtctgacgtatttcggcttcgcgatcttcatggggattctctccgcggtcgcttggtttgtcatcatcacgttcgtccccggcttgtccacgaaattcatctacgtgtttgaagtcacctacgttctgttgaccgcctatgcgatcctccggcaccacttgatgaacatcgacgtcattgtcaagcggaccgccctgtatacgattctcagcacgttcgtcatcggcgtctacatcgccatcatcctgattttcgaggtcgtgttccggtcgcttaccggatactcctccctggcggaaaaaatcatcgccgccttcatcatcgctctcacttttcaacccgtgcggacgctcatcgaaaaaacaatcgaccggatttttgcccggggaaaggtcgattaccaggacgccctggccaaattcacccgctccctcggttccgtcctcgatctccgggagctggtcgatctgctcgtctccatctcgggcatcctgagggccaagaacctggccgtcatgctccgggacgaacagcgcggacggttcaagatcgtcgcctccaccggcttggactctccccttcataagatcggattcgatgatttcaacgacatcgtccgggtgctgaacacaaccaataaaatcatcacgaccgacgacatcaagcggctacggtcggaaaacgtctacaagaacctcccgggcgaagtgtccgccctccgggccgaggtcatccttccgatcttcgtcaaaggggaattggacggcatcctgttcctgggggaaaaacggtccgaggagcggtacgaccgaaacgatttcagcgtgctggccaccttggccgacgaagccggcatcgccatggagaacgcgaagctttacggcagcgtgaaacggacatacttcgaaaccgtccaggccctgtccctggcgatcgaggccaacgatgaatacacccggggccattccgaccgggtcacgaaaatcgccgtcaaaatcgccaagcgcatccggctgacccgggaacggatcgacaccttgaagttcgccgggatccttcacgacatcgggaaaatcggcgtcatcaaggaagtcctgcacaagcccacgaagctgagcgatctcgaattcgccctgatcaaaaaccacccggtcgtgggcgaggaaatcatcaagccggtggctttcctggacaagatccggccggtcatccgccatcatcacgagcgattcgacggaagcggatatccggacggcctccgggggaaagacattcccttcctttcccggatcatcaccgtggccgacgcctacgatgccatgaccagccaccggccttatcgcagcgccttgagccacgagaccgccgtcgcggaaattacaaaatacgccgggacgcagtttgatccggagatcgtccaggccttcctggaaatcgccgggacgttgatttgatccgtcaggccggcgggccggccgcggcctttctctcgcgagagacgccgagcttcggccttgccgcgcaaccgatcagaacggcgtctcattcgattgacctcccccgcgacattggctatcatgaaaccgcctccgggagaagggaaccatgaacatcggggctttcgggcgtgtgatcgccggtgtgttgctgttggcggcggccgccggcgcttatcttcgtccgaagatcggatgcgatgcgagctcgattcattgccacacgaatccctcggccgggccccaggccacgattatccgcatcttcaacaacggcggcgcgacgctgagctggcggatctccggcggcgcgccctggctcaagatcagtcccctttcaggcgtgaatgacggcaccgtgaccgtcaccgtcgatcccgccggccttgagccggggagatacgaaagctcgttcatgatcaaggccaagttcgcggtcaactcgcctctgaagatcaaagtgatcctcgacgtcgcgaccgaccgtctcctggccggattccgggcctcgcgctacggggtcgatcccttcccggaccccgcgtattgggcgtccgtcggcgcgggaatggcttcccgctttcccggcgccggcatgggatgcgtctggatcgtcggcgtcttcctcgacaacggcgattgcgggttgaactttccttctccgggcggcgattatccctctattcatttcctcgacgaagaccagaacgaagccgccttgagcttctttgatgccctggatctctcggtttggctccaggtcgagcccggccgggcctcggtcccgaagctcatcgacctcgttctccgccgctacggccatcatccctgcgtcaagggcgtcggcgtggacgtcgaatggtacaaaacggattcggcccaccccgagggcaggcgcgtgaacgacctgagcgccttgctctggagtctccgggtccgatcctataacccggcctatacccttttcctgaagcactggcttatcgacaaaatgccgccccgctttcggctcgggctctggttcatcaatgacagccagcaattcggctcattgggccagatggcgagtgaattcaaggcctggggcgagcatttctggccgagctcggttggattccagttcggatacgaggccgataagccttggtggagcttgctggccgacccgccccggaatatcggggatgccatccgggcggtcgtgcccaacgctttcggtcttttctgggttgattttacgatccaggacatctttccctgacgaagcaagctccgcgatgaaggcattcttcaaaaaaaaacgcgttctcgtcacgggggggacgggtcatctcggaagcgccttgatccatcaccttgtccaaaacctggccatggacccggccgccatccgcgtattctatctccaaggttcgaccacccggtcgctccgcgacatccccggcttggattacgcgccggggaacatcctcaacccggacgacgtcgagcgggcctgcgcggggatcgattatgtctttcatgcggccgcctcgacctcgtttgatccgcggagcaagaggcttcaatggatgatcaacgtggaggggacacgcaaccttttggagtccgtccggcgatcgccgaccatcaagaaaacgtcctttacgagcaccgtcaacgtcctcggcgttccgaacccggccggatccgccggcaacttcgagaattccgatccctacaccaaccggccgaggctgcacgcttttcgttcccgggaggagactctgtcgtttatcgacatggtccgcgagcgccggtcatcaccttgggaaaagaggatcggaatcggctacttcgattccaagctggccgcccaggagctcgtgaaccgctacgtccgtgaccacggcctcaacgtcgtctcggttcttccggggacgtgcttcggcccttacgacgttctcggcggcaacgggatttacctcctccggatctaccacggcgccttgccggggatcctcaagggcggcttttccgcgactcacgtgatggatgtcgtcgaaggccatctcctgtgcctggtctcggcggccgccggcagcgcttacatcatcaacggcccgaggaaggacgatctccattttacggacatcgcccggaccatcgccgaggttctcggccggcggtatcccgagaaaaaaatcaagcggccctcgatgatcgttccctcggggccggcctgggcggcggcccgcgcttccgagctcgtcgccgcggtccggagaaggccctgcctcctcagccgggccatggttaaggccggctcccagcctcttttctacacgcatgaaaacgccgaacgcgatcttggatatcgtcccaaacgcaccttccggcaggccgtcgaggaaatggccgcttacttcgaaaaggaaggattgttctccgccttaacgccccgacctttcccggccgggccgcccgagacgggggaattcccggggttctgaatccaccgtaaccaaggttcgtccggcgtccgtgcctcagagagttttaacgccggtccgcggcgcgggacgtcgaaacgggaggcctactcgatcgatccttggcgcggagcgggcgcgaaacggtctcttatcgcggccgttgcggcgctccgcgaatccaaaaaaccggcggaatttccgcggaataaaaagcgcgcctggagagactcgaactcccgacccgctgcttagaaggcagctgctctatccacctgagctacaggcgcgccggaccggcgcttgaggccattccgaaaaaaaatcggggaggacggattcgaaccgtcgacctcttgctcccaaggcaagcgcgctaaccaggctgcgccactccccgcgcgaaggaagacgcggccctttttccgggacggggcgcgtgtccccgatttttatagcagatagcccgggcatcgtcaaaccggggcccttgatgaaaagacgcgcttccggggaaagaaaacgggttcggatcgggagtctccgcccggcgtttcgcctgctttcttcacaagccgggatgcctgcgtctccctcaagcccttcgcaacgaagcagaggcggttccatcggcttgcccgaaaggtaaatcatcctattttccttttaataaaataaaagcaagaaagaagaatcttaaaagatttataaatcgtgcgggttaggaggcgggatccgagaccggccgtcgaaggccgcgctcgatctgggagcgggggatgcggacgacgatgggtcggccgtgggggcagacgccgggattggccgaccggaaaagctctcgaacgaggaattccattttttcgcgcggcaggtattcccccgctttgaccgccgacttgcaggccatcgccgccaggagccggtccttggccggcgcgggcgcccctttcttggattcgtcggcggcggccagcacaacggacaaggcttcctccggccggaaaacatcgggatactcgcggagggcgtagctccgcccgcccatcggttcgacccggaagcccgaggagcgaagcatcggcccggcttcctccaggccgatttcctgaaccggggaaagctcgaaaacgaggggaaggaggctcattttaaccggccatttcctttcccggtcgatttcaacgtaacggtcatagatcaccctttcgtgggcgttgtgctggtcgatgatgagaagatcgccggcctcctcggccaaaatgtaggccgatccaagctgtcccaggacttggggggattccgccgcccgcggaaggactccggcggcgggaaaatccgcgaaatccgttccccggatgtatgtccggcccccctcgccgacgccggaacattcgggctcctccctttccggcccggcgccctctccattctccgttccggcgggggccggccttccgcccggcgggactccggccccgtccgccaggatctcggaaagatccctcacccccagaacccgggtccgggccctctcgaccaccctccgaagcagggggaaaaagagctgggcgtccctgaaccggacctcggttttggccggatggacattgacgtcgacttcgcccggaggaatgtcgacgaagagaaacgcctccgggaatagccctttttccagaagtccggagaaggcctgttggagagcggccgaaaggatcttgtcccgcaccggccggcggttgacgaaaaaagcctggcggccgcggttcgggcgtccgtacggcggacgagagacgtaacctgaaactcgaaccggaccgtcggccaggtccgcctccatcatcttatcgagagcgtccttgccgaagagctgaaaaagccgctcccggaggccggccgccggcgggcaatccaggacggtccgggcgccatgacggacaatcaggcgcagccccggacgggccaaagcgatgttcgtaagcatcttgacgatcaacccaagctcggaggaatcgctcctcaggaattttttccgggcgggaaggttggcaaagagatccctgacctcgacttccgtcccccgcgggaaagccgaatcccggacctggaaggcgccgccgggctcgctctcgacaagggtgccgggctcgtcgcctccctcggaggtgcggagagtcagccgggagacggcggcgatggaagccagagcttctccccggaacccgagggtagcgatggcgaacagatcgtcttccttggaaatcttgctcgtggcgtggcggacgagagccaaggccgcgtcctcccggctcatcccgcagccgtcgtctcggacgcggagaagcgatttccccccggccgcgaggtcgacggccacggccgaagcccccgcgtccagggcgttttcgacaagctccttgaccaccgacaccggccgttcgatcacctcgccggcggcgattttccgggccagggcatccggcaggacggcgatgcgggtcatgagcggaagccgtcccggcctcggagttctccggtcgtgtcccgctcgccagcggcggcgatgcggacgtggaccggcgatcccaagggcgcggccgccccggagacaagcacgtccacgtagttggacgtcaggacctccaatccgcccggtttcgactggatgacgacgccgggaagcgtccgtccgatcagccggcgccgataggcgaggttttttcttccggacaggcggcgcagccggtcggcccgggatttgaccgtcgcccgatccacggccggccgttccgcggctttggtcccggggcgggcggaataggagaaaacgtgggcataagccaaaggggattcctcgagcagccggaccgtctcctcgtagttgcgttcggtctcgcccggaaaaccgacgatgatatccgccccgaggttcgcttccggggatcgccgctcgagctcggcgcaaagttcgcgataggacgcgttcgtgctctcgcgtcccatcaaccgcagaatccggtccgccccgtgctggagggacaggtggaagtgcggcgcgatccgccgcgatccggtcaggaaatccaggagggggcgggaaaggagccggggatcaagcgagctcaggcgaaggcggaaatcccccggaagctcctcgattccggaaagaagctcaaggagagaggacggcggccggaggtcccgcccataagaacaaaggtgaattccggccaggacgatttccgcatacccggcggagactaactcctcgacgcgcgtccaaaggtccaggaccgggacgctgcggctccgcccccgcacggagggaatgacgcagaacgcgcaagccatatcgcagccgtcctgggctttgaccagcgcccggacgcgataagaaaccggctcttcggcccggaccgccgtctccggcgactccccggcggcgcactgtccggcaagcgcatccttgtccgcgttggcgacgactcgccaaacgccgggcagagctttcacgccctccggatcgcgctcggccaggcagccggtgacgacgagacgcgcccggggattctcctgagcgattttgcggatgtaccggcgcccgtcccggtcggcccgggcggtcagggtgcaggtgttgatgataacgatctcgccctgcgaatcctcttcggccagccgccagcctttcttctggagcgccgccgcccagtcgaacgcctcggcctgattgacgcggcagccgaacggatggatgaaaaacgaggtcatagactctggcgggcttttttcgaatcggcttcgacctgggcggccattccggctttgtgggcggcgagccgggttcggaggtccgggctcttcagggcgagaatctggacggccagcagggccgcgttggccgcgcccgattttcccgttcccatcgtcgccacgggaatgcccttgggcatttggaccgtggagagaagcgcgtcgagcccgccaagccccccgctttcgaccggaacgccgatgaccggacggatcgtatgggcggcgacgatcccggccaagtgggcggcctttccggcgacggcgataaaaacctcggccccgccgtcctcgaagcggcggatgagctcgatcgtcctctccggcgaacggtgggcggacgtgacctccagaacatgcgtcacgccgaattgcttcaggatctcgagcgcttccccggcgacgtccaggtccgacgcggagccgatcaagatcacgacatccatgattctcctcctctcaagccccggccggattacggggcggattcgaacgccccgatgtcgcgccggtattgcatcccctcgaacgaaatcttttcgacggcccggtaaatccggttcatcgtttccgacagacgcggttcggcggcgcagacgcccagcacccggccgccttcggtccgataccggcctttttcgaacttcgtgccggcatggaaaacgaccgctcccaggcgatcggcgtcctccagcccctggatggtcttgcctttctcataggatccgggataccctcccgaagccaggacgacgcagcccgcggcccggcggttccaggtcacttcgtcggccaggatatcctcggcgatggaagccataaggagatcgacgaaatcgctttcgagacggagcatctggggctgcgtttccgggtcgccgaaccggcaattgtattccaagaccttgggtccgtcggccgtcagcatcaggccggcgtagagagcgcccttgtatttccgcccttcctcgagcatccgggtgaccgtcgggaggatgatcgtcgacatgattcgggcgtacatctttcggtccaagaagggcgagggggaaatcgaccccatccctcccgtgttcggcccctttccgccgtcaaagacggttttgtggtccatcgtcgtcaccaggggaatagctttggccccgtcggcgatcacgatgaaagaaacctcgcggccccggagaaactcctcgatcaggatccgccctccggcgccgccgaaccgcttctcgaccatgatctccttcaccccggcctcggcttcttcctcattgcggcagaccaggacacccttgccggcggccaggccgtcggctttgagaacgaccggaaagccgaattcccccccggccagcacggcccgggccgactccggggaatcggcgatccggaacttccccgtcgggatgcggtgccggtccatgaactgcttggcgaagaccttgctggcctccagctcgaccgccttcttggacgggccgaaaatgcggaggccgcgcttctcgaattcatcgacgatccccagcgagagggggatttccgggccgacgaccgtcaggtcgatctcctccttgaccgcgaaatcggccagcgccgggatatcggtttccgagatgggaacattttcggccaccagccgggttccgccgttgcccggagcgcagaagactttcgagatcttcgggctcttggcgattttccaagccagcgcgtgttcccggccgcccgacccgaccaccaaggctttcatcgttccgctccttcccgaagggacggcttaagagacgcgcccgacggcctcggcgaacgcccggccgatgtttgaggccggcatcgccgcggcgaagacgcgggcggccaagggcacggcttccgcggccggcagacagtacttcatctcggagaacttccggcggaacgccgcgacgtcgtccttgacccggcggttgcggatgacgcagtcggcgatcaagccggcgacgacgtcgaaatccttccccgtcattccgaaccgggtcatttcctggacccccatccggatgccgctcgaaacgaggaacgtctcgtcgtcggggagggcctggtagttcgtcacgatgttgttgtcctccagccggcgggcgatctccatgccgggaccgaaggagctgacccggatgatcacttggtgggtgtccgtgtatccgtcggccgggtcgccctcgaccggaatgccctgggccttgagcgaggcggcgaatgatttggcattggcccggaccgcggtctgaagctcctttttgaaggcgttcatctcataagaagccatcaggagacccagcagggtggccaggtggtgattcgaagtcgagccggggaaagcccggccacggatgtcggtccagagatttttcagcggcgaggacggagcgatgtttccggccacgagcccgcgctggggaccgaagaaggtcttgtgggtgctcccggtcacgatgtcggcgccgtcctgaaacggctcctgaaaggccccgtaaaggcccaggacgtgggccatgtcgtacatgatcaccgggcgcttcggccagtccttgacgatcccggcggcgaaggcgaccggctcgggatgaaggaacatgctcttgccgaagacgatcagctcgggcttcttgacctcgagaagcgcggccagcgcctcaaggtcgatcttgtaggggttgtctttccggacgggaaagttgaccacgttctccttgcccgtagccggatcttcctcgatccaattataaagcgcgcccatcggctgggagctgagatggcctcccttgcccaggtcgttgttcatcaccaagcgcatccggcgggagacttggccctcggcccggccccggttcaggaacttcgtgacgcccttgaagacgatctcgttggccatctgcccgctgacgggccggagctcgacgtcgacgcagccgaaaaaggcggctagctcccggcgggcttcaatttcaacgtccttgatgaaatcgatcccctggtaaaaatagacttcctcgcccttcatcgtccggtgctcggcgtatcggcccgacggatcggccatctcgcatattttcacgagcagcgagggcgtcgattccgagggaatgaggttgaggcattcccgttggcgccagaggctgttgcgttcgatgcggtccacgagctttgcggttttttccgacagcggcatagtcatcacgtcctcctcaatcacattactcaacggcggcctttcagcaaccgcaggatttcttttcaatttcggcgatcttggccagccggcgttcgtgccggcctccgtcaaaaggcgtctcgagccaaacccggacgatttccaaggcggtctggttgtccaaaatccgtccacccagggtcaggcagttggagttgttgtgccggcgggccatttcggccgtcgccggcgtccagcagacggtcgcccggatgcccggaaacttgttggccgccatggccatgccgatccccgttccgcaaaccaggatcgcccggtcgcaggttccggccaggacggcctcggcggccgcggcggcgtaatcgacgtagtccaccgattctcccgcccgcgacccgagatccgcgaaatccacgccccgcccggttaaaaaccgggcgatcatttccttcatttcgaaaccggcatggtcggaagccagggcgatgttcattggatcatcctcgccgcctcgggcatgacctcgagcgctttcagaatcaccgggtcgttcttctcgaacgcccgccaaccctcctcgcccccccaaagcagggaagcgatttcccgctcgagctcgcgcttgacctcgaccgcggcttccttgaattttgtttcgtcggccggcatcttgttctcaatcaaaaaagcccggaaatcctccagaacggccgcatcggcaagaaagactcgactgagctgaatcatccccggggccggccgggcggcgtttccatccgctggaaagacaaatttcttggacaggagcgtctggcgggacgtgaattttcgggcataagcgaaaaacgcgccgcggatgcggagctcggcggtatacggcagaaggttgaagacgaccgtgaggtccggggtgatgcccccctgccccaggaccttgcggcccttgtccgtgtatttcacttcccggtccgattcggcgaggaccttggtgtcgaggaaataatcgtccaggtgagagtagtctcgctggagggagcggccgctcggcgtgtaatagcgggcgatggtcaaggccatggccgtatcctcggagagggggaacatcttttggaccaggctcttgccccaggaatcctcgcccaggataagaccccggtcgtgatccatcaccgccccggcgacgatctccgaggcgctggcgctcccttggctgatgagaacgaccaggggaacggcttcatactggccgttgcgggtcgccggatattgacggtcgaaatcgggattccgtccccggatcgagacaatcgactcgccccgggcgagaaattcgtcggcgacgccgatcgcctggaacaagggtccgccgacgttgccccgcaggtcgaggaccaggtttttcatccccgcgtttctcaacgtctcaagcttcgcctccagctcggcggtcgtgttctcggcgaaatagcggataaaaacgtaccccgtggcctcgtcgagcataaaggcgtaggggaccgaatacagggggatctcctcccgggtgatcgtcagatcgaacggcttttccagcccctcgcgggccaccgtgatcgcgaccttggtccccttggggccgcggagcttggagaccgcgtcgttggccgagatcaagaccgtgctttcgccctcgatatgggtgatggtgtcgccggcttggaggcccatcctccaggcgggcgtgccctcgatcggagcgatcacgacgagcttgtccatgtgcttctgaatctggattcccaggccgaaataggccccccgctgctcctcggacatccgggccaggttgtccggatcaagcagatacgaatggggatcgagcgtctcgagcatcccccggacggccgcccgggccatcttgtccgcctccgccgttcggaaatattcggcttgaatcaggccggccatggccccgaccttctcccgcccttccacccagggatcccccggacgaacggcggcgcctaacagaatgccggcccccaggagaaggaataacgtcttgtttttcatgaatttccgacggcaaatcttatcacgccgggcgagcctaagtaaaggcgcggttcttgacttcccctgattcccggtctatattttgaaggctttcccgaaaatcagaaacgcccatgttcggaaatatcggcttgccggaactgatcgtcatcatggggctcgccttgctcattttcggcccccgcaagctcccggaaatcggccggaccatcggcaaggccgtccgggaattcaaaaaatccactgaagacatcaaggaaaaattcgaagagcagatccgcgtcgaggaattcaaatccctccaagccgacctcaaaaaggacctgcgcgaagccgatctcaggaaggatctttcggggaatggggaagactcgaaaagctcctgacgagatgaccttcctcgagcatctcgaagacctccggacccgtctcttccgctcggtgctttccctcttcatcgccgtcttcccggcttacatcttcagcaaggacattttccattttctctcccgccccctgacccggtttctgcccgagggcgaacagctcgccttccggacgctgaccgagcccttcatgctctacatcaaggtctcgttcctggcggccttgttcgccgtctcgccgtacatcttctaccagctctggaaattcgtcgctcccggcctctaccaaaaggagaagaaatacgtctttcccttcgtcctcttcacttccgtcttcttcatcggcggggcggcgttcgcttattacatcgcgtacccgttcgcctgccggttcttcctccagctcggctcggatttccaagcggtgatcacggtcaacgacttcttcaacctgaccatcaagatgctcgtcggcatcggcctcgtcttcgagctgccgatcctcatcctgttcttatcgaaaatgggattgatcacctcgcgatggatggtccgcaagttcaagtacgcggtcctggtcatcttcgtcatcgccgcgatcatcaccccgacgcccgacatgatcagccagagcatcctggccgtcccgatgctggcgctttacagcctgggcatcgccgtcgcctttttcttcgggaaggagcggaaggaccggagggagcggcgggcgaaggaaaaagcagccgccgaggaagcctcatgagctccctccggccccggctcatcggcctgaccggacccaacggggcgggcaaaggcgaggccgcggcttttttcgccgcccgcggctatgcccaccggagcctctccgacattatccgggaagagctggccgcggccggccttccggccgaccgggaccatctgatcgccaagggaaacgagctccgccggaaaggcggccccgacatcctggcccgccgcctgcttaagctcgtgaccgggccgacggtcatcgacagcatccgcaacccggccgaggtcgagcgcctccggaaggaagacggattcatcctcctggccgtcgacgcccccgcccccctccggttcgagcgcgcccgccggcgcggccgggacgaatcggccgccaccctggaggagttcctccgcaaggaagcggaggagcggagctcgaacccggccgcccagcagatccaccgttgttttgaaatggccgacgccgtcgtaagcaacgacgggacgctcgaggaattgcacagccggctggaggctttcctatgaatacgccccgcatctccaaggatgagtattacctcgggatcgcccgcgaagtcgcccggcggagcacctgctggcgccgatccatcggcgccctgatcgtccgcgacgatcagatcgtctcgacgggatacgccggcgcgccccgaaaaacgcgggacagcatcgagcacgggttctgccttcgggacaagctccaaatcccccacggccagcgctacgagctctgccggagcgttcacgccgagcagaacgcgatcatcaacgccgcccgggcgggcgtcagcctgcttcgcggcgacatgtatattttcgggagcgtcccggacggccggccggtcgacgcttttccttgtttcatctgcaaaaaaatgatcatcaacgccggcctggtccgaatcgtttgttccacggccgccggcggctccacggcctttctcgtcgacgattgggcccgagcctggcgggagggagacatcctcgatgacacgcatcaatacggctgagcggaaatccccttggccgcggacagccgcctttctcctggcggccgcccttctggccccggcggccggccccggcgaagagaatcttttaaagctcctgggcattgccgtctccgccgaatccatcgactatgtcgttcaaaaaacgcccttccagcttcacaccctcctgaccgagcagcgccatcccaaaacctggatgctcggccgccgcatcgccgccgatacggccgaggggctgcggatgctgttcggagtggacgaggacatcgccctcaagctcgacggcctcgtccgcgatccggagcagctcggccgggtcgagcgccttacggaggcgttcgccgcggcgatgctcggccggcggaagatctacatgtacggctgcggggccaccggacggctggccaagcaagtcgagagcgccttctggcggccgttctgggggggccttaagaagaacgaaccgggcctctgggcgaaatgtgccgcccgtctcgatccggccgttgaagacgaattgatcggcgagatgaccggggccgaccgggctttgatcagctcgctcgagggattcgaggatcttcagctcatcggccgcctccagcttcacgaccgcgggattaagccgggggacgtcgtcgtctgcgtcacagagggaggggaaacgtcatcggtgatcggaacgatccgggcggccctggaggaccggaaggcccgtcccggatatgatcccgccgaatcgcggaaagctctgttcttcgtttacaacaacccggacgaccttctccggccgttcgagcgaagccggatcgtcttggaggatccgggcatcaccaagatcaatctgacgaccggcccccaggcgatcaccgggtcgacgcggatgcaggcgacgacgatcgagacgttcgtcgtcggaagcgccctggagacggccgtcgagcgggtgttacggacgatgctgtcgaaaaaggaaatgggccggttgggcttctcccgggaaacaagcctcgaggatcggctcaaggccttcgccccgcttcttccggaaatcaagcgcaaggccggagagatcgcccgcttgacggacctcgaagcccgggcttacgccggcgggcgcatgtcgacgtatttcgcccgggagggtttgatcaccgtcttcatcgacagcaccgagcgcagcccgaccttccggctggccccgctggacacggtccgcgaaccgcggaggaaaagctggatccaggtctggacggcggccgaggctcgcgctcaagcctgggaggcttttctcggacggccctttcgcgggctcgatccgctgttcttccgcaaaccgttcgaaaacgaaatcgacgacgtctacctcagggacaaggcccttcaaagcctcgcccgggcgggagacgatcaggccgccctctacgatttttccttcggaggaacaaacgtccaaaagcgagccccccaaaaaggggacgtggcgatcctggctctcgtcggggacgagatcggggaaagccggaacccgcgatccacgtttttccggttcgccgagctcgcggcggaaaagggcgcggccctgggcgtcctttccatctgcgatctaaataaggagaagaaagcggccggaggcgtttttccaagtccccggatcgacgtcgaattcgccgtgtcccgggaaaacgatccgatggggatccgtcagcaaatcgccttgaagatgatcctcaacgcccactctacggccgtcatggccaagcttggaaaggtcgtgggaaacacgatgaccaacgtcagcccctcgaatctcaagctgatcgggcgggcgacgtatctcgttcagcttcacgccaacgacatcctgggcaaaccggaatgggtgaaggcgttcggcgcccggcccccggtctcctacgccgaggccaacgccgtgcttttcgattccatcgccttcctgaaggaccggccccagggcgcggccatctctcccgaagtcgccctctccatcgtccgcatcctggaatcgctccggcggaaaatcgggataacggccgaggaagccctggcgatcgtccggaaaacgagcctgcaggattacttggaccaagccccccggccgccggcgccgggggaatgaccggagtcttcgaccgccgcggctcacccgatcggcgggaggccggtcaaatcatagcaggggctgatcgacggccgccgctccttgcggggggcttttttctcgggagcgggccgatcggatttcggctgcgggtaaacgaacgtctccccctcgaaattccgcatgaccacctgttcgtcggagatcgattggatgtatttcgggagaagcgggatctttccgccgcctccgggcgcatcgatgcagtaatacggaacggccaggcccgaggtccagccgcggagggcttccatgacctcgatccccttctggaccgtcgtccggagatgatccgtcccgctgacatagtcggcctgatagatgtagtaaggccggacccgggccatgaggagcttctgcatcagccgccgcatgaccagcgggtcgtcgttgactcccttcaagagaaccgtctggcagccgagcgggatcccggcgtcggccaggaggccgagggcctggttggcctcgggggtcagctcgtccgggtggttgaagtggacattgacgaagagcgggtgaaacttgcggagcatcgccgccagtttcggagtcacccgctgggggaggaagcagggaacgcgcgttccgatccggaggatttccacgtgaggaatggcccgcagcctggtcaggatgtattccaggcgggcgtcgctgagcatcagcgggtcgccgccggaaacgatcacgtcccggatttcctcgtgggttcggatatactcgagaccttcctcgatggccttcggatggatcttcttcggatcgccgaccttgcgcttgcgcgtgcagaaccggcagtaggaggcgcaccgatgggaaaccaggaacaacaggcggtcgggataccggtggacgacgctggggaccggggaatcgtggtcctcggccagggggtcggaaaccccgctgtgctcgaccagctcggccgggtccggaacgacctgccggtagatcggatcgccttttgttttgatcaagccggcatagtacggagtgatcaacgttttgaaatgtcgggaaatccggcggacttcggccacgtccaagtcaaaggcgcaggccacttggtccggcgtccggaggctcccccttgcgatttgagaccaatcgtccatggtcctttctcctctagctcactcgcttcgtatagatcacgcgcccgtccccgggtccgtaaaaatcagggatccgggcggtttcggtgtaattcaaccccaggtaaaaacgcctcgtcggctcgtatttttcgctggaggacgtttcgattacgatcagccgcccgccggcccggcggacgtggtcctcgagccattcgacgagaatccggccgtatccgcggccctgggccttgggatcgacggccatccagtacaggtcgtacgtcccccgggtgagcggggtggggccgtaggtcatatatccggcgaccgcgcccgtctcgtccgtcacgacgacgatggcatagtcctcctgctccggccggccgagagtgatgtcgatcagctcctcggcgaccgcgatttcgtccggtcggaaaaatcccgtcgcctcgatcagggccaggacggccgggcggtcggcgggggtcatgggccggatcatcgcttctctccccgaagcagagccttatcgatcatctgcttccaaaaattcttatattcgacgccggccgcgcccaaagcccgggcatacccggcgttcaagctgatgtcaggattgggattgacctccaggatgaacggccgtccttttttatccacccggtaatccacccgggcataatcccggcactcgcaggcggaaaaggccttgaccgcgatttcctggaggagcgtccggagcccgtcgtcgatcgaggccgggcagcgcggcggcgtcgactgaaacaggacgtcgtccggatgccacttggccgcgtaactgcagatattcggctgattctcgggcatgccttcaaactcgatctcgctgaccggcagggcctcggtcttctccgcgtccctcaccgcgacgttgaactcccgcccttcgatatacgcctcgacgagggccggttccccgaagacgtcctggatatgcccaagctgccgacggaggccgtcctcatcccgaacgacggattccgggtggatgccgaggctggcgtcctcgttgttgggcttgacgatcagggggaaaggaaggttgattttctgatccggggattcggccagcacggccggcggcgttgggagcccgaacgatttcagaaccgccttggttttgtatttatcgagacacagggccagagtccgagaatcgttcccggtgaagggaacgctcaggagctcgagggccgcggccacgttcgcttccagctgcggccggcccaggaacgcctcgcagagattgatgaggacgtcggcgttgagggtcttcagccgctggcagaagttcatgaaacttttctgcaggggaatgatgaacgcggcgtagcccagctcggtgacggccgtcaagacttccttggccgtttgctcgacggattcctccgacggccggtcgaccttgttcgccgtgagcgggtcataggcgttgaaggcgatgcccacgagaaggttcgggccggacttggcgctcatgaccggcctttccgggaagaaaccaaaccccagcggcagcgggcttcgtccacgacccggagaatgagctcgtcgtacgaatacccggccgtccgggcggctttgggcaggcaggaattatcctcgggattcggaaggattcccggaaggggattgacttcgagaatatgagggcgccccttctcgtccaggcggacatcgacccgggcccaatcgcggatccggaggatccggcaggtgtcggcgacgatcgtccggatctccttctccaagccggaagaaatccgggcgggacacttgaaaatcgccaggggcttttcgggagtgtcccagatccatttcgcttcgtaggaatagatcggatgggcttcggggggaaggagggaatgatcgatctcgacgatcggcaggatctcgaggttggggatgttgcccaacacgcccacggtgaactcccggccggtgagaaaccgctcgatgatgacgggctggcggtaaaggccggtcacttcccggacgcgggccgccagttcctccgccgtggcgacataagaattgtttttgatccccttgctcgatccctcgtagagaggcttgacgatcgccggcagcttgatcccgtccggaacggcctcgccgggctcgacgacccggaattcgggattcggcacgccgtaatacgagaggatttccttggcccgcgatttgtccaggcacaggctcagcgtcagcggatccgatcccgtgtagggcaggtccagcatttcgcacagcgtcggaatgtggccttcccggttggggccggtcaaccgctcggcgatgttgaagacaagatccggccgggtgttccgaagccgcgcgtaggcgtcttcgtcggactcgatcgggatcacttcatatcgccggcctagggcggcggccacggcggaaatggtttcgtccgagtcgcactccgcaaacgtatccgacggtggaggctcctccccctcgtcctcgacgaccgggagaaccgccgtcgcttcggcgacgctttgacgcagagaggcggccattcctttttttgaactgaagagcaaagccactttcatcttcgctcttcggtccctcgcctcaagttgaaatagatcccctgcttcgtaatcatctgctgccgcttttcaattcatcgttcttcaaaagtagttatagaacatttaagggaaatgtcaatagggtttgtcaaggaaaatacaaattattcgtttagaccccgcgccgccccccattagtagtgctgtctagaagccggacatgtcagcgcatgaactcgctgtaaagatagtaagcccggggatcgagcacgcggcgggacgccttcgcccggagcgcccggtagggggaccggtaatcgctcggcggaacatgaaaaaggagaaaagctccggccttgtggagatcctcgaggtcgggctccggaatcaatctttccagatgaatcaccaatcccgccccggccgcggcggccttcgccgcaatgtcgcgcagcaggagcagagccggaagatccgcgccggctccggcggccgacacatgaatccaggcccctcgccgggccagctcttccaaagcctcggccggagccccatggtggtagtatcccagccgccggtttcccctccgcgcgtcctcggccagaacggccaagtcctccgtccgccgtttttccgttttattcgaaagataaagagaaacgctcccgcccgccgcgtcgcggagagccctgagggagaggacgacgccctctccttccgcaagaagagggccatgctgaaaatgagcgatctctccgccgcctttcccggcggcggcactcaggacggcgaggtcggccggcgcacggccggccttatcggaggtgaaaagatccgcgcccgaaagacagatccgctccaattcaaggacggtgaggcgcccggcatcaatcagatggaggcgcccgccccgccggcgccgtccccgggcttcgtccaggattgcataaaaatccgcctggtcatcccggaggacaagggtccgcttcttcgatgggaaatcgcgctcgtccatgatcgatccgccggatgcgaagtgtaccttcgcccccggaccgtgtcaagaaaacgaatcgcgccgccttaaatcacaaaaatcttgccccggcgcatcgtcccttaccgtttttaatctttagacgatcctcggtttcggtaaggttttgatatggcaagagaataccctcttgggcaaggcttttattggcttgaccggaaaactcggaaccggcccttcgatttcagcggccgccctcccctcgaggacgatgagttcccgtcgctcgtttgaacccgcttccttattcttatatagtaatcgtggggcaggcggatgcgcaaaaaaaccctggttcttttctccggagggctggattccacgaccgccctccattgggccctccgccggggcggcaaggtctcggccctgaccttcgactacgggcagcgccaccgggtggaagtccgggccgcccggacgatcgcccggcggctgggcgtcccccacaagatcctgaaaatcgacctggagcagatcggcggttccgccctgaccgagccatccatcgccgttccgcgccacaagcggctcccgcgcctccggacgaccgcaccgccggtcacgtacgtcccctttcgcaacgggatcttcctggccttggccgcggcttgggccgaagcgcaaggaatcaacgagatcgtttgcggcttcaacgtcatcgattcgccggcctaccccgacacccgccccgttttcgtccgggccatggaacgggccgtccgagcggggacagcggcggccgccgccggccggccggtccggatccgggcgccgtttgccgggatgaagaagtcggagatcatccggacgggcttggccttgggggcggattattccctgtcgatcacctgctattcagggaaggaacggccgtgcggctcgtgttccgcctgcctcctgagagctcgggctttcaaggaagcaggctgttccgatcctctcgtcctgcggacaagcaaaggagaacttccatgagctggacgttgaaagtccgggaccgtttctcggccgcccactttctgcgcgaataccagggcaaatgcgaaaaaatccacgggcatacttttcaagtggaagtcgaggtcgacgtttccgatctcgacgccgccggcctggggatcgacttcgccgtcttgaaggccggattggccgaaatcctacctgaccacaccctcctcaacgacgtctatcccttcaatccctcggcggaaaacctggcccgtcgtttctatgaagacctcaagcctcgttttccggtccgggcggtgacggtctgggagtccgaggatgcccgggcgacctacgctgaagatcgctgagatcttcgccggaatccagggcgaagggctccggatgggaaggccggcggtgttcgtccggctggccggatgcaacctccgctgctcgttttgcgacacgaaaagcgcttggagaggcgggcggctcatgacggccgcggccgtcgccgccgccgtgaaaaaagcgcgaagaccgtggtccggcgagtggatctgcctgaccggaggggagccgttcacccaggacttcggacccttggccgaacgcctgcgggccgagggattccgcatccaggtcgagacaaacgggacgatcttcaaagatatccctctcgattggttcacggtctcccccaagccgccggattacgatgccgcccccgaattccacgcccgggcccgcgaagtcaaacttgtcgtctcccgggaactgacgcttcgcgcggtcggccgcgtccgggccgcctttcccgcctccgttccggtttttctccagcccgagtcgaaccgtccggaaagccgcgaccgggcgatccgcctcctccggcgggcatcggcccgagggctcggggacgtccggttgggcgttcagctccaccgcgttttcggtctgcgctgagccgcgggtccatccgccggccgcccggcgttttcgggcggatcgggagcggccgccgccgcaacgcttcccctcgagaccggggcgggccggatcccgtttcgccccccgagaaagaagccgtactccgtccgggcgagaaaaacaccgaggagaatgaccgccgccccgccgatctggcgcggccggagcgcttcccccaggatgagcagggcgaacaaggccgtgaagaccggcgtgagattgctgtaaacggccgtccggatgtttccgacccgccggaccgaaacgtaccaaaccaagtagccgacgaccaagctgaagacggccgagaacccgaggccggcccaggcggccggcgaaacgctccgccaagaaatccgcgaaatcgcgccggcgcagaacgggaagtaggccagggcgccgaggccgacggtgatcgccgtgaacttcaagggcgacaggcgctcgaggaactcctttgaaaaaaccgtgttcaaggaccaaagaatcgttccggcgaaaatcatcacgtcgccctggaagcccgcgctcaatagccggattcccccttccccccccgcgatcacaagatagaggccggccgcggagatgacgatgcccaaggccgccccccagcggactttttcgattcggaggaggccgccgatcaaggccacgatcgccggcgaaaacgacagaatgaacgaggagttggaggccgtcgtccggctcagcccgccgatgaacaggatctggtaaagggcgtggctcatgatcccgagcgcggccagcttccaaaactcgcttcggccgacgcggaagctctcgccggaggcggccatcaagccgacgaggacggcggccgtcaggaggaggcgcaagccgttgaatccggccggcgaaagctcccggagggagatcttgatgatggaaaaattcagcccccagatcagggtgaccaggagcatgaacacgtcgctccagccgaacgacggattcttcgggggatgggcgctcatgggcatccgggaaatcggcgggaggcgttcaaacggccgcgagtcccgccgtcagggacgtttcttcgccctcccggcgtctttttgagcccgcggataggccgcttcgatgacggagaggaggccgccccgggggttgaaggagccctttaccgcggcccggaccggacgggcggccgcgacgatgtcctccaggatccggttgacggcgttctcgtagaaaatgccgagatcgcgatacgccaggaaatattctttcaacgatttgagctccaggcacgagtcccgagggacataggtgatcgtgatcgtcccgaaatccggcagccccgtcttgggacagaccgaggtgaattccggaaccgtgatcgtgatttcatagtcccggaattgattgggaaaaacgtcgatggacggaagccgggttttgaggccggccgtcgcttcctttttaccgtatccgctcatctggaaccgtcccggagaacatgttaggatatgatatccgatatcccccgggatgacaatcgacatggcttcaccgtcttttctctacggcccggttccgtcccgccggctcgggtattccctcggcgtggatcttttgccgtttaaaacgtgctcgatggactgcgtctattgtcagctcggcggaggggcccgaacgaccgtccggcgccgggctttcattccagtcgaaaccgtcctggccgggatcgagaacgttctccagcgcggagaccgggtcgacgccatcacgttttccggatcgggcgagccgaccctccatccggggctgggacgcctcatccgggccatcaagcggaagaccgcggttccggtggtcctcctgaccaacggctccctgttcacccgcccttcggtccgaaaggacgcggccgccgccgacatcgtcgtcccctcgctcgacgcggcgacggaagacgccttccggaaaatcaaccgccctcatccgggtctgtcggcggccgcgatcatcgaaggcctggccgcgttccggcggcatttccacggccgcctctggctggaggttcttttcgtcaaagggatcaacgaccgtccgtccgatctccgggcgctcaaaaaagccatcgcccggatccggcccgaccgcgtccatctcaacacgatcgtccggcctccggccgagtcttgggcccggcccctcggccgccgggatctcgaaaaaatccgcgccttcctcggagaaacggcggaaatcatcgccgatttcaaaaaaccggggcggcggacccgaacgaaggatctcccttcccggattcttgatttcgtccggcgacggcccgagacggccgaaaggatcgccgcctccctgggcgcttcgccggaagccgtcgagcgcgccggccggcgactcgagaaagacggccgcctccggctcgtccgcctcaacggccgcgtttttttcgagccgggagccgccgccgggaaaaaatagggccggccgcctccgtcgctgatggatcggccctttaaatccctcctcccgataggggaaaaggatccgcttggcttgacgacgacaaaccctcatgatcggagccgtcgccttaagcttcgggctcccctttaggatctgttcaaacccttccatccgctggacttcgggccggctcaagatgattgtctcctccatgtccgccttcatcccgaagcggacatttttgctttgcccttaaaggggacattttcgctcggcagttagggggacatattgactcggcttaaacagagcgttccgcggaccttttcctttccggccgtttgtgttacctttagttttcgacaaccgctcattctgaagcgaacgcccgccgcccggaaggagaaagagatgctcgacacgactcattttcccaaggcaaaaaaatattggctgatgggaaagctctatccctggtccgaacgccccttgcacccgatggtccacgcccttcattacgggacctcggtttttgaaggcatccgggcttacgggacgtcctccgggccaaagattttccgtcttcccgaacacgtcgagcggtttttcgtctcggcggatgtcgtcaagatgaaagtcccctataccccggaggaagtgaccgcggcgatcaagcagaccgtccgggaaaacgaaatggagtcctgctatatccggccgcttttctactacgcgtacggaaacctcgggttgatccccaaagcctccccggtggagctcgtcatcgccgcctgggaatggggatcctatatgggcgagacggcggtcaacggcatccgggtttatctcggcccttggcggcggacccatcacagccaagtcgacatgcgggccaagctcggcggagcgtatgtccaatcgaccatctccgggctcgaggcccgggccatcggcgccgacgaggctcttttcctcaacatcgagggccggatcgccgagggccccggagaaaatctcttcgtcgttaaaaacgaggtcatccggaccaacgcgctttccgaatccatcctcgaggggatcacccggacgagcattctcgaaatcgcccgggatctcgggatcaagacggaaatcgggccgatttcgaccggcgacctgaccggagccgacgaagcttttttcaccgggacggccgtggaagtcatcccgatcatccagctcatcgacggctcggaccgaaacaccccgcggcgcgaaaccgtcatcgggcaaggcaagccgggaccggtcagcctgcggctccgccaggcctacctggacatcgtccgcggaaaaaatccgaaatacgaaaaatggctttcgcccctggactgacggtccccgcctgaccgtcgacgggaatggcgcgcgtccgcccgtcccccccgggacgcgatttccggacgcatcatcttcggcatcgggaggtccgcccatgatccgattttcggccaagcttccggccggatgcctcattctcgccctggccgtcaccctggccccggcatccgacatcttcccctatcccttccgcatcgaacaactggacaacgggttgaagatcgtctccatcccgctcgaaaatccggacatcatcgcgtattacaccatcgtccgctcgggttcgcgcaacgaggtcgagcccggcaagtccgggttcgcccactttttcgagcacatgatgttcaaggggaccaagcaagtcccccgccctgcctatgacgatttcctcacccggctgggcgccggaacgaacggctacacgacggacgactacacgtgctactacgtcgtcttcgccggccgggacaacttggaagaagtcgtccgaaccgaggccgaccgcttcctcaacctttactacgatgaggagatgatcaagacggaagcgccggtgatcgagggcgaatacctggccagcgtgtccaatccgggccggcggctgaacgagctgctccgcgacaccgccttcgaagcccattcctacaagcatacgaccttgggctacctgcgggacatccaggacatgcccaaccaatatgcttacagccagctctataagaagcgcttttacgccccggataacactctccttctcgtcgccggggacttcgaccacgcccggctgatggagctagtccgagccaactacggcgcctgggagaaatcgaattatgagctcgtcacctccgtcgagcctccgcaaaaggcgcccaagcgggcccacctgccttggccgggcccgacgcttgcccgcttggccgtcggcttccacgggccggctttttccgacgctgtttcggacaaagccgccctggatcttttggccgcggtcgccttcgactcctcctctcctctggtccagcggctggtccgggaagagcagaaatgcctgagcctcaacgcccgcttcggcgacaaccgcgatccgggccttctcctcttcagcgccgttgtcaaaaacgacgacgatctggcgtatgtcgaagccgagattctccgggaactggaacggttgaaaaaagagccggtctcggaggaggacctggcccggatcaagtcgaacatgaaatattccctagccgacgccctgggcaccacggacggagtcgccggaaccctggccttctatatcaatttgaccggggatcccgggacgctcaaccggttgttcgccctgtacgatcggatcacgccggccgacatccgggcggccgcggcgaagttcttccggccggaaaattcaacgaccgtcaccttgacgggaggaggcgcccgatgaaagcacggtcgacgaaaaccgcgtggctgggatcggccgtcctggcgggaacggtgtttctggccgcctgcggcgattcctccggaccggaccgcctgacgaccgagctgcttcccgtccccggcaatccccttgtcgccttccgcattctgaccaaaatcggaacagccgaggatcccaccggcaaagacggcttgtgccgcttgacctggaacctgctggccgagggcggcagccgctctcgcacggctgaggatatcagccgggcctttttcccgatggccgcctccgtctccctgagcctggacaaggaaacggccgtattttcggcgaccgtccaccgggacaacctggccgctttttacgctctcttcaaggaaatgctcctcgatccgggattccgggaagaggacttcaaccggctgaaggcggcccaactggccttcgtcgaaaaaaccttgaccggcaacatggacgaacagttcggcaaggagatcctgggcctgatgttatacgaggggcatcccttcggccggaccgacgccgggacggtcgagaccatcggcgggctgactctcgacgacgtgaaggccttctaccgggagcacttcgtccgggggaacatcaccatcggcctggccgggggatacccggagggattcccggaggaggtccggcgggacttcgagaagctcccggaaggattcactccccggctggctcttccgccggcctccatgcccaagggccttcaattcgtcctggccgaaaaggacacgcccgggacggccatctccatgggctttcccgtttcgctcacgaaatccgacaaggatttcttcgccctctgggtcgccggcgcccatttcggcgagcatcgccagcacgtctccctcctgttccagaaaatccgcgaggagcgcgggcagaactacggggattacgcctacatcgaacacttcgtcgagggccgcgacaagttcccggcccccggtcacgcccgccggcagcagtatttttcgatttggatccggcctttgcccaactccaaccgccatttcgtcatccgccagacgctccgcgagctgaagcggctcgtggaggacgggctctcggaggagcggtttgagctcgtccggacctaccttctcaattacaccaagctttacgcccagaccctggatgaacggctcggctggcggatggattcccgtttctacgggtacgaggactttctggccgaagccgcccggattctcccccggttgacgcggaacgacgtgaacgccgccgtgaaaaagtatctccaggcgtccgacgtctgcatcgccgtgatcactccggacgccggacaattgcgggacgatctcgtctccaacaagccgtcgccgatccgctatgccaacccgaacatgccggccggcgtgatcaacgaggacacggtcatccagatctactccctggacgtccggccggaaaacgtccggatcgttcccgccggggaatttttccgccggcctggaatccccgccggcagatgagccgaggccgcccggcgggaaaaggcgcggacacgcgccgaggccgggcttctccgccgacaagcggcggtgaggccgactggacgccggctgagcgaaggctcctggcttccctcggcccgccggagaaaatccagttttttctcaaccgcctcgcctacgacccggcgccggggacggcgtccccccggcgcgttctccgggagcggaaagccaactgcttcgagggggcgctcttggccgccgccgccttccggtatcacggccggccgccgcttttagtcgatatgcgctcctggaacgacgacgaccatgtcttggccgttttccagcgcgacggagcctggggctgcgtcgccaaatcgaattacaccgttctccgcttccgggagcccgtctaccggacgatccgggagctgatgatgtccttcttcgacatcttcttcaacgcgatcgggcagaaaacgctccgccagtattccgtccccttcgacctccgccggttcgactcccgccgctggatgaccacgcccgacgacatcagctggatcggcgacgccctcgaccgggcccgccattaccgggttctcacccccgcccaaatccggggcctccaccgggccgatccggtcctggtcaaagccgggctgttgggcgcggatccctcgggcctgtttaagccgaaataatcccggcggcggtcgtgcggatcaactcccaagcccggcggacgtgccgttcctcggtcagccgcgagccgatcaccaggcgcagggtgaattttccccccaagaccgtatgagtcaagccgatctcccccgaggcgttcagccggtccatcaaagccttgttgatccgcgcggattcctcctcgttccgcccgccgttccagcggaagcaaaccagcccgaaatgcaccggcgctggaacctcgaatcccggctcggctgcgacccagtcccggaacaggcgggccaagcggagatgttcgcggacaaaagcccggaggccggcggtcccgtacgaccggatgacgaaccaaagcttcagcgcccggaagcgacggcccaagggaattccccagtcccggtaattcttgacatagggatccgcgcctgtcttgagatactcgggatggatttcgaacgtccggatcagggcgcccggatcgcggatgaaatacgccgaacaatcaaagttcgtcaacatccacttgtggggattgaagacaaacgaatcgagatattccgccccgtccaggatccagcggttctcggggcagacggccgccgtgccggcgtaggccgcatccacgtgaagccacacgccgtggcgggcgcagatttccccgatcggccggagaggatcgacggccccggaggacgtcgttcccaacgtggctacggcgaccgccggctggaggccggccgccttgtcggcccggatcgcctcctcgagcttatccggccgcatggcgaaggcggcgtccgtcgggatgacgcggaggttttgacggccgtagccggcgatcttgacgcccttctcgatgctcgaatgcgtctcggtcgaggcatacgcgatcaggggacgccgcagcccggattcgttcgattcgaaatccgtcgcccgttcgcgggccgagatcagggcggccagggtggccgtggaggcggtgtcctggattacaccctggaggccggccggcaaaccgagcatcccccggagccactccatgaccaagtcctccaactccgtggccgccggcgacgtcagccagctcatcccctgagcccccaggccggccatgagcatttccccgagaatggattccgggctgttgttggccgggaaataggcatgccagccgggatgctgccaatgggtcatccccggaagaaggatctccttgaagtcggcgaaaatacgttccatcgactcgccttcctcgggcggcgaggcgggcagcttcgaccggatctcgccgggtttgacccgggacatgaccggaaagcgctcgatattttcgagataatcggcgatccagtcgacgaattcatgggcgtgacggcgaaaactctcatgatccatggattttctcccgaatagaaacaagaacattctaaacaaagccttccctccggtcaaaaggactgttttccaggctgttttcgggacattcgagccgaatatttgcatttaaagccgccgaagcgcggtttcacacgtcgccatcgagtcatattcatcgaaaatgcggatattggaaaaaagatattgccttgtgatcgatgatgtgatataataaaaaaagtaggaaaaaggggaagcggtaattcctttaaaatcagacggttagttgttttatatctcatctctctcctgaaaaatcctgcgggctgtttttgtctccgccgtcttcacgcgaacctcttatcgcccattgcaacgatccgccggcccggatcgtactaatcaatggaatgaagaacagacgttacctcctttcccctcctcctctccttttttagtttttttcttttttccccaggcggcccggtcgcgaaagcgcccgggccgccttcgttatctctcccttccctccctccggtccgcggcccgctttttcatgaaatccgccggcctcgacatcgtaaaaggccggattttctcgccctcgcaagtccggcgatgccgattcgatccggcgtctctccgcgtccttccgtcgcaaagatccattcccccgactcttaccgctgtcgggccgcggttttccaacgccttgaattcctccgcccggaatcataagataattaaaaaggaagggttttatgagcaaatcgttcgatcaggggaaggacgaagtcgccaagctgtgccgtttcttcgagacgaacgagctggaattccgggctcccggcgtcaaagaagcccatatccgccaacaactgatcgacccgtttttcatttcgctgggctgggacgtgcgcaacgccgcgatgatcgctccgcagtaccgcgaagtcgtccctgaagacagtttggagatcgaaggccggcagaaagcccccgattacaccttccgggtcggcgcccagccgaaattcttcgccgaggccaaaaaatgcggcatcaatatcaacctcgatcccgggccggcctaccagctccgccggtacggcttcagcgcgagggtcgccctctccatcctgacggattttgaggagctgggcgtctatgattgcggcccgcggccgaaaccgggcgagaaggcgtcttactcccgcatccagtatttccgggcggaagaataccccgaccgcttccgggagctgtgggacgtgttctcccgcgaggcggtctggtcgggagcgttcgaccagtacgcggcctccaagcggaagcgtggcacgtcggaggtggactccgaattcctgaaggaaatcgaaggctggcgcgacgtcctggcccgcaacatcgccctccgcaatcccggcctgtccctggacgacttgaacctcgcggttcaattgaccatcgaccggatcgtctttcttcggatggccgaggaccggggcatcgagcccttcgagcaattgctgaagctctgcgagcggacggaaatctacgctcatttcgtccgcgtcctctgccggaaggcggatgacaagtacaactcgggcctgttccacttcgagcgggagccgggagtggccgaggcgcccgaccggctcacgccgtgcctgaaaatcgacgacaaggcgatcaaaccgatcctccagagcctctattttgaatacggatcgccctaccaattcggcgtcatgcccgtcgaaatattgggcacggtttacgaacggttcctgggcaaggtcatccgcctgaccgaaggccaccaggccaaaatcgaggagaagcccgaagtgcggaaagccggcggcgtttattacacgccggcctacatcgtggactatatcgtcaaaaacacggtcggaaaaaagatcgaagacaaaagcccggcccagttggccggcgggaaaaacgggccgccgcttcgggttttggacatggcctgcggaagcggctcgtttctcctgggggcataccagcggctgctcgaccactgcttgacgtggtaccagggccacaagccggaatcccataaaaaggcggtttatcaggacagccgcaagggcgattggcggttgaccatcgaggaaaagaagcggattttgacgacgcacgtcttcggcgtggacatcgatccccaggccgtcgaagtcacgaagctctcgcttctgctcaaagtcctggaaggggagaccgaccagaccttcggcgaccaaatgaagcttttccaaacacgggccttgccgaacctgtccaacaacatcaaatgcggcaactcgctgatcggcccggattatttcagcggaaggctgatccctgatccggaagaattgaagagggtgaatccgttcgattggaacgcgggcttcccggaagccatgaaagccggcggtttcgactgcgtgatcggcaatccgccgtatgtccggcaggaaattctcggccctcggttcaaggaatatgcccggaaatcgttcgccacatacgccggaacagccgatttgtatacgtattttattgaaaaaggcgtttcgttattgactcctgatgggttgttctcctatatcgtcgccaacaaatggatgcgggcgaattacggcgagccgcttcgcctttggctgaaatcccaaggccttgaagaaatcaccgattttggggacttgccggtttttaaaggcgcgacgacttatccttgcattttgcgtattcgcaaaacgagccctggcagcgatggcgccagccgttccaaggttgatgtttccctcatccgttctttggattttcgggatttgagcgaatacgtcggggcaaattctttttttatgacgaaatccgggctcgatgataaaggctggtcgcttgtggccgattcaagccgaagattgttggataaaatattatctgtgggaattccgcttgagaattacgtgcaaggtaaaatatttagaggtgtattgactggattgaatgaggcttttgtcatcgatcaagaaacgagagagaaccttgttcgaaaagaccggaagagcaccgaaattattaagccttttctggccggtcgcgatatcaagcgctattcgccgccaataagtaataaatatttaatcttttccagacgcgggataaagatttccgagtatccaacaatttatgaacatttacttccatataaaaataagttaatacctaggcctgaagattggaaaggaaaggaatggcaaggcaggaaacccggcgcttatcaatggtatgagattcaagatacggtagcttattacaaggaatttgaaaagcctaaaatcatttatcctaatatctgcacgaagcccgagtttagtattgattatagctttagttttgcgaaccagaagtgtttcattattcctttagaagacatttttcttttaggaatattgaatagcaaattatcatatttccttttcaaaatgatttttccaaggttaagaggaggattttatgaacctagttatatatatatgaagacattcccgattcaagattttatggaaagagaaagaaaattgtttttcttagaaacggttgaaaggatgatcgctttttctaggcaattgtccgaagtaggaacggtctctcaaaaatcaatcctccagcgccaaatcgaggccaccgaccgggaaatcgatcagcttgtctatgagctctacggcctgaccgacgaggagatcaaaatcgtcgaaggagaaacgagctgatttgtttgtatatcagaacagtcgtcaaataaggtccgcatgattctttttcatccaagaggatgcggatttgtagagaaattccgctaacgcgatcatttcatcaaattccgcaatggataccgacccggcccggtcatactcgctgatattccgtttcttccggaagacatcgaatttacgaatcgttttgtcattaatttcgagcgtgaatttcaaggattggatgactcggaaatgatgggaatccttggcggctcggaagccctcggctgccagagcggcgttcgcgcattgaagggcagcgttataagcgatattgaaacgccaatcgagactgagcttcttatttcgacagtccttcagatcccgctcgataagcctgaagagatgattgatctcttggcggcggctcaagtgttcgacgagccattcgttctttttccattcggccaaagtcatgcggatctccgagtatcggaataaacggcgatttcataatttcgcggatcagatgatcgccttgggagagccttctgcggaattccctggacgacataaccaggggattgatttcgcgcctgagacggtcctgaaccgggtggatagcgttgacgatttcctcgaaccttacttcaccgacgataaggagatcaagatcgctttcgttgccggccgagccccgagcgagagagccgtaaatgagcacaacggagatccttttaattagagggtcaagagccgccctcagaacatcggccgcgcccgccgtcttggtcacgagcatttttatttccgggaaaatcgggcagtgcggattgccctgaaagagaacctggttgtccttgacggagcgggtgatcagccccgcatccgccagctttttcagttctctctgtcctgctccaggagaaatgttcgccagccgcagaatttttcttaagtgaaatgcttcatcgtcgtggccgaagagcaagaccagaattgaccgtttcgttttcccgaagagcgcgtcgatcagacagggtgttttcattatgtatccattatgggtacatttgtactcatttcgggtacgattgtaccttttttggttacatattgcaagtatcaatcaccaacctatacgacgcgatttccgcagataattctcatacgcctaaatgattctgaggccgcatttagcaccgtacataatcttgacaataaaaatcgaaaagaagagaatggactctcgtcgcgagctggagcgaagggaagtccgtgaaaagcggacgcagtccccgctactgtaatcgggtacgaatcccggaagacgccacggtcgccgcaaggcggcgggaaggcccgggaggaggatgatccgagagccaggaaaccttcaccggcttgagcgaaaccaatcttcgggtcggaagaggaggtttctcatgaccctttatcaccattcccgtcgtgtctgtctcttaatcccggcgatcgcggttcttatcggacaagccgcggcttccaaagacgcctcgccggagacgacgccttcgtttctcagccacgagatcgtcgtcacggccgcccgccttgaaacgcccctgatcgagatcgccagcgccgtcacggtcatcacccgggaggatctcgaacggacccgcccggcctccgtcctcgacgctctccgcgacacgcccggcttgggcctcgtccgcaacggcgggccgggagcggcttcgtccattttcgtccggggggcgaattcggaacatgttctcgtcctcctggacggcgtgcccctgaacgatccgatcaacccgtcccgctccttcgacctcgcccacatgaccctcgacggcgtcgaacggatcgaaatcctccgcggtccccaaagcaccctctacggttcggacgccctcggaggcgtcatcaacatcctgaccggccgggggatggggaaaccggcggtgacgttccgcgcccgcggggggtcgcacggaaccctctccggaggactggacatccgggggtcggccggggcgttccggtatgacctcagcgcgtcgcgcgaatcgaccgaaggcgtttcggccgcctccagcgcctacgccggaaacaccgaacaagacggctatcgcaactggacgctgtccggccgggccggcctggtcttggccggcggcaccgagatcgacctgatcatccggggcgtttcggcccggaccgatctcgacgccttcggcggtgcctacggggacgatcccaacagcatccaggattaccggtccgggttcgtccgggcccaaatccggaccctgagcgccggagggcgttgggaatccaaagccggcttcgcctacatccgttcaacccgcgaaaacgacaacccggtcgacgaaagccatcccttcgactcggagaccgcccgttaccgcagcgcccggttcagggcggactggcagaacaacctcttcctccggccgggccacacgctgacggccggagccgagatcgagcgggagacgggcgactcggcctatttctcggaaagcctttgggggccgtacgccagcgtcttctcccgccgtcaagcggaccgggccggagtgttcgtccaggacaggttccgcctgggccgggcgtttttcgccacggccggcctccggctcgaccttcacggccggagcgggacctcgctgaccttccgcctggcccccgcctacctcatcgaaaaaacggggacgaagctgaaggccacgatcggaaccgccttcaaggcgccttcgctctaccaattgtacgccccggagacgctctggggtcccgtcggcaatgagcatctgcttcccgaagaatcgttggggtgggacgcgggcgtggagcagacgctcgcgggaggagcgatcctcctcggcgcgtccttctttcaatcggatttccggaacctcatcgattacgatttcctccaaggctacatcaacatcggccgggcccggaccagcggctgggaattcacggccgatgcccgcccggtcgagagactgacgctccggcttggatacacgcgcctggcggccgaagacctcgacgccggcgtctcccttctccgccggcccaaggacaagctctcgggagcgatcgagtggacgccggcgacgggatggaaagccgttctcacggccgcggccacgggggagcgccgggattacgactacacgggctgggccgccgtgcccgtcatccttcccccctacgcgatcgtcgacgccctcctctcgtatacgcccgccccggggcttgaatttttcggccgttgggataacatcggaaacacacgctatgaaaccgtcttcggctacggaacgtggggctcgtccatttcggccgggtgcacggttcgtttttaaaagatcgagggaagcgggcgttttccctcgactcgtgtataatgaacccgggagggggagatggaatccttaagcgcgaaagaactcgtggagctggtccggtccgttttccctcatcatccgggagacagcatcctctcgatcctcaccgacgtcccccggaccgcgtcctccgaccatccggcctggaaaagccgtcgggagacggccttccgctggatgggaacgctttacgacgcccggcgggacatccccatggacgatgtccggctttatgtctatcccgatgtcggatcgaacaacgccgacctgccggccgacgcctatctctgcggaacgattcctcccgacgaggcggcctccttgaaggaaacgtctctccgggttccgttcgccgacgtcttctccgaatctcagatcctcatcgctcccaccgagtactcgacgaccgcccccttgaagctggcggccaagcattacggcttccgggcggcgacgatgcccggcttcggaccggagatgatccccgccctgagggtcgattacgtccaggtggcccgatacgtcgaggccgtcaaggcccggctcgacaaggccgtcggcgccgacatccttttcctcgtcgacggccgggtggaagcccggatgcatttcgacctccgccaccggaccgcccactcgagcaccggccgcttccccgagatcggaacggccgggaacctccccagcggcgaggcttacatcgttccctacgaaggggaggggaaagcccccagcgccacggccggcgttttgcccgtggaaatcgggggggaggtcgtttactacaagattgagaagaacacggcggtttccgccgagggcggaccgacagcccaagaggaatcggattacttgaagcgggagccggcctacggcaacatggccgagctgggattcggggttttggggaaattcggcctcagtccctgcggcgagattctcctggacgagaagctcggccttcacatcgccttcggccggagcgaccatttcggcggacggatcggcttgaaggatttttccacgccggccgcggtcatccatctcgatcgcatttacctcccggaaatgcagccccgggtcgccgtcgtcgaggtggtcctttccttcgcccgcggccggacggaaatgatcatgaaagacggccgctacacgattttttaagatcccgggcgggccgccccgggtgggcaagcgttcccctcgccgccgacctcaggaaagatgctcgacgaggatcttggccgcgatggccaggaggacgagagcgccggccaattccgcgctcttgcccgcccagcgacccaaaaccggcccgattttcgttcccacggccgagacgacgaacgtgacgaggccgatgacggccgccggatagacgactgaaacgttcagcgccgcaaggctcaatcccacggccaaggcgtcgatgctcgtggccagggacaaaaggagaagatgccctccccgcgttttgtcgggacacggcccggccgcctttccgtctttctttttttccaaggcctcaacgatcatcttgccggcgaccacggccaggagcccggccgcgagccaatgatcgaacccccgaacgagatcgacgacggtccggccgacggtccagccgagaaggggcatgagaaactgaaaagacccgaagctcccggccagccggaacgtttgccggggcgtgcagcccttcatgaccaggctcacgccgatggccacggcgaacgtgtccatggccatcgccagggctaaggccaggaggacgccgaagctcattccggctgttccaaaaacgaaacggccaaggccgccagcaaggcggccgcccgcggcagggaccgctcgtccaggtcgaaaccgggatgatgatgaggatagggcattccgtcgcctatccccaagaaaaggaacgctccgggcgccttccgaagataacgtgaaaaatcctcgccgctcatcaccggggcgaagggcgcgaaaacctcccgcccccaaagcgcttcgatcgtttgggcggcgaaatcaacggaggcggacggattcaccagcggcgggtatccctcctcgtactcgaggaacgcctggactccgccggcccggccgaccgcctcggtgatttcgcccagcctctttttcatcaactcctggacggccggctcgaacgcccggaccgttccgctgagatggacctcgttgggtatgatgttgtaaaccgtcccgccccggatcgtcccgaacgacaagacggccggcttcaacggatcgacgttgcggctgacgatgccctggagggctgtgatcagatgcccggccgcgacgatcgggtcggccgtggcttgaggcatcgatccatggccgccccgtccctttacggtgatgcggaagttgtcggcctgggccatgaccggccccttcaccaggccgatcttgccggtcggaagagtttgccagagatgaattccgaaaatgccgtcgacgccctcgagggctccggcctcgatcatcgggccggcccccccgggcggaagctcctcggccggctggcagagaaagaccacccggccgcggatcttgtcccgccgggcggccaggatatggaccgcgcccatcaagccggccaagtggccgtcgtggccgcaggcgtggcaggcgccgggaatctccgaccggtaaggcttctccccttcctcctcaagcggcaaggcatccatatccgcccgcagggcgaccgtccgcccgccgggaaggccgtccaaatcggcccgaagccccgttccggcgagccggcggacgggaaggccgagccgctcgaaaaaagcctttaaggcggcggaggtttcatgctcgttgttggccgtttccggacggcgatggaacgcgcgccgccattccgacatccggccggaaagggcttccgcttcgttttttatgtcttcatacatgacggcgctcccaggggaagctcttaatctaacagaaaacgggccgtaaatcagcctgcgcgaggcgccggacggcgtcggccggcgaggctcacgaccgtcacggtcaggatattgaccagaagcgcgacgaagccggcgttgaggccgcaaaaaggatcgtgtttcccgaagacgaggaacgcggcggcggcgattcccgcggccaagccggcggtgacgcccctccgggtgacttttttccaaaagaggcccaaaacaactcccggaaaaagctgggccacgccgtcgtatccgagcaacaggagattgacgagggcattgggcaggaccagggcgaaaaccagggccgccgtggcgaccgccaggaccatccagcgagagacccgcatcaccgccgcgtcggaggccccgggacggaagccggcccggtagacgttcttggaaagaagcgccgccgccgacagcacgagaacggaggagggaaccatcgccgtcaccgcgccggccgcgccgacgaacccgacgaaccacggcggatacgtccgtcggatgagcatcagcagcgaaagatccccggttttcaatcccggcaggatcaggaatgccgtgaagccgacgaaaaaaaccaggacgatcggtatctggtagaggggcatgatcaccgcgttgcggcggatgatccggtcgctcttggccgagaaggccgtcccaaaaagctggggccacatgtaaaatcccatcgcggtcaaaagaacggtcgacatcacccacggaacgcccatccccggcgcggcccccgggaaaacgagatgcccgggggccttgtccatcagggcccggaacatcccgccgatgctcccgaaatggatcctcggcaggccgaagccgacgataccgacggccgccagcatgaggatgtccttgatgaccgaaacccaggcgcttcctctcaggccgctggtcaggacgaaggccgtggtcagggcaaaagagaggagaatcgcggccgttgaggaaaccgccccgtcggatgccgcctcgacgatcaagccgagcccggccagctgaagctgcaggtagggcaagatcgagaggatcccgatgacggccaccaagatccccaggccgcggctttgaaaaacatggacgaagaagtccggctgggtgtggagcccggctttcttcccgattttccaaatctcggggagaatgaaaaacgacaagacgtacgccaacgcgccgtagatcaggatgtagtaggtcggagcgcccttggcgtacgcccagccgctggctcccaggaaggtgaaggtcgtgtacacctctccggccatcagaagccagatgatcacgaccccgaacttccggccgccgaccgtccagttctcgaggttcatcgggatccggcggccggccagaaagccggcggccgcggccgccaggatgactcccaggatgatcgccagggccggggtcacggcttgccgtccttgccgtttttatctttccggaggaatcggtcggcgagatacaggaatgccggagtcaaggccacccagcccaggatccagaacaggacgaacggcaggccgaggacgaccggccggaggcgattgacgaacggaagggcggcgaccagggcgacaaagggcacggcgccgcaaaacaacgcctttttcatggccggccgcatgatcctattatccacatttctccgcgcccgtgctataatgattcttttttcaacacgagaatggggcctccatgagcggcgaagacaagatcatcctccggggtgtccgcgtccataacatcaagaatgtggacgtcgacattcccctgaacgccttcaccgtcgttacgggagtgagcggttcggggaaatcctcgcttgccctggacaccctttacgccgaaggccagcgccggtacatcgaatctctctcctcgtacgcccgccaattcctcgagcggatggacaagcccgacgtcgacacgatcgaagggcttccccccgccatcgccattcaacagaaagcggcgacgaaaaatccccgctcgaccgtggccacggtcaccgaagcttatgatttcctccgggttctttacgcccgcgtgggcacggtccactgccgacgctgcaaccggcccgtgacccgggacaccatcgacgccgtcgtggacaagctcctggctctccccgccggcacgccgctttcgatctcatttgaggccgtgatcgaaaaaagcccggccgccctcaagaagctcggctttttccgggccctggtcgacggccggatcgttccgttcgacgagcttccatccctcaagggccggaccctgtcggtcttcgtcgaccggcttccggccgacccggacgaccgggagcgtctggccgattctctcgagacggcgatgaagcacggccggggacgagcccgcgttcaaacggaagacggccggtcgttcgccttttccgacagcttggaatgcaaggagtgtcggatcgcctacgaggatccgacgccgaatctcttttccttcaacaatcctcagggcgcctgtccggaatgccatggattcggcgatttagccgtcctggacgaggaaaaaatcatccccgatccggccaaatccctcgaggagggagccatcgagccgtggacgaagccggtctcccggggagtcatgcgggagatgcttcgggaggcccggcgacgggggatcccgacccggatccccttccgtgatctcaaagccgagcaccgccgcttccttttcgagggagacgagaagtggtacgggatcaagggcttcttcgactggctccaggcgaaaaaatataaagtccaggtccgggtctttctcagccgttaccgcaaatacgccccctgcccggcctgcgtccaaacgcgcttgaacgcggacgcccggggagtcaagatcggaggcttgtccatcggggaaatcgtccgtctgacggtcggggaagccgcggtctttttccaccacctccgcctctcccccgaggaagcaaagatcgccgaaaaactcgtcgccgaaatcgagaaccgcctcaagtacctgatcgaagtcgggctggattacatcaccctggaccggatgaccttcactctcagcggcggagaagcccagcggatcaacttggccgcggccctcagctcctcgctggtcgggacgctgttcgtcctggacgagccctccatcggactccatccccgggacaacgcccggctcgtccggattctccagtcgctgaaggggatcggcaacaccatcctcgtgatcgagcacgatccggacatcatccgggcggccgaccatctgatcgacatgggcccccgggccggggaaaacggcggcgaaatccttttcgccggaccgctgtccacgatcctgaaaaagcccgacggcggtcggccgccctccgacggcgcctcgatcaccgcccgctatctcaccggcgagaaagagatcgccgtcccgcgccgacggcgcgagccgcgcggcttcctgctggtccgggacgcccgggcccacaacctcaaacgcatcgacatccgcattcccttgggcgtgttcgcctgcctcacgggagtctccggttcggggaaaagcacgcttctccatgacgtcctttaccggggctggagcggggaatcgcgggacgccttcgccgatatccggggcttggagcgcatcgacaagatcatctgcgtcgaccaatcgcccatcagcgcctcgccccgctccattccggccacgtacctgaaggccatggacgggatccgcgacctgttcagccaaacccgggaggccaagctcgccggcctcaagccagggacgttttccttcaacaccaagggcggccggtgcgaggattgcgagggggcgggccggcagatcgtggagatgcagttcctgtccgacgtcattctcgtctgcgagggctgccaggggaaacggttcaagcgcgaagtcctcgagatccgctatcggggaaagaacatcgacgacgtgcttcacctgaccgtcgacgacgccctggaattcttcggggaccggccggaaatcgtcaagaagctccggccgctccaggacgtcggcctgggctatctccgcctcggccagccgacgaccaccctctcggggggcgagcttcagcggatcaaactggcgtttcatctcatccacgagcgcgatcgtaacatcttctatctgttcgacgagccgacgatcgggctccatcccgaggatgtgtcgacgcttctccgctgtttccagaggctggtcgaggaagggcactcgctcctggtcatcgagcataacctggacgtcgtcaaaagcgcggattacgtcatcgacctggggcccgagggcggggagaacggaggaacggtcgtcgccgaggggacgcccgaggccgtggcccgttcccgagcctcgatcacggcccgctacctgagaaaagccttgagatcctagggccgcgtctcgacctgttccggcccgatcaatccacccgaaatgacggcgttcatcgcctcgggcacgctccaatccacatcccgaacctgggactcgggaacgatcagcataaagcccgaggtgggattgggagcggtcgggacaaagaggcggaggagcgtccggccggactctttctccctcatcgaacccatgacgaagccgatggaccagacgcccggacggaaatgctcgaccagaacgacccgtttcagcccctgtttttccggcgcggaaaaggccgcgcccagttgttttccgagcaggtaaatcgtcttgatcagggggatgcgggtcgaggccttgtccaccactccgatcgcccagcggccggcccagtgcgaggcgatcaagccgagaagataaaggacgaagaggacgagaagcaggccgaaacccgggatgctgaatccgatccagcgctcgaacagccgggcgatcctctgatccacggcgatatagaggaactgcaggacaagaaacgacagggccagcggcaaaagaacgagaaaaccccggaaaatacgggttttcagatgagtgaagaacgccttcatttttccggatcggtcggcggaccggtcttcgttgcggccgcgggcttctcctcccggcctgaaaccggtttcggcggcgttttccgccccgccttcgccgccaggaagccgacgatcaaccccacggccaggatgcccaaaacgaggaagaacagcggcgcgtaaacgggccagaacagcaggtggaacttgacgagcacggaattttggatcatcaggacgatcacgaggccgaccaggacgagaatgacgatctgttttactttcatcggacgctccttcgctccggccggcggcggcctagaaccattttttccttttgaagatccggacgaggccaaggcccaggatgatcatgacgccccagatgaggaaatagccgaaacgccacttgagctcgggcatatgctcgaaattcatcccgtagacgccgacgaggaacgtcagggggatgaagatcgtcgagatgatcgtcaagatcttcatgacctggttcatccggttcgacatgctcgacaagtacgtctccagcatcccggccagcatgtcccggtatgtctcgacgttgtcgatcacctggatgatgtgatcatagacatcgcggaagaagatgctcgtcgagggctggatcagcggcgtttccgtccgttcgatcccggcgacgacctcccgcagcggccagaccgccttgcggaagatcaacatctctctcttgagagcgtggatggcgtggagcgtctcttcccggggatcgcgaacgagttcctcctcgagcgtatcgatccggtcgccgagggtttccaaaacgacgaaataatgatcgacgacggcatccagcagggcgtaggccaagtaatccgggccgagcttccggatgcggcccttgccgtttcggatccgttcacgaaccggatcgaacatgtcgcccggagcctcctggaacgtcaggacgaaattccggccgaacaccaggctcagctgttcggtgacgagctcccggccttggccgccgagctcgatcatccgggcgacgaaatagaacgaggtttcgaggtcgtccagcttggggcgctgggacgtcgtcatgatgtcttccaaaatcaaggggtggaggccgaaagcctgtcccaatttttcgacgacgtccggatcgtggacgccgtcgacgttgatccacgtcacggtggaagtcaggttgaaaggcaaacactcctcgagggccgcgacttccttctcgaggaaatgcccgttgtcgtaatcgatcagggtgatgcgcggccggtcgattttccgccggccgacatggacgaggcttccgggaccgagaccgcttttcttggaacgcgaagacgcattccgggccatccgctccctcctcccgccgttccgcctcccctcctttttccggggaagagccggttcagcggcttcgccgttcggacgtcttttccggagcccgggccggcttctgctcgacgggggctttttcctccgcctccggctggccgagaccgactttccggcggatatcggcgtccaattcggccgccagggcggtgttttccttaaagagcttcttgacgttctcccggccctggccgatccgctcgcccttgtaggaataccaggtccccgacttctcgaccaagccgacgttggcccccatgtcgacgaggtcgccctcccgcgagatgccctcgccgtagatgatgtcgaattcggcgtcccggaagggcggggccatcttgttcttgacgatcttgaccttgacccggttgccgacgacctggtccccttccttgatggccgtcatccgccggacgtcgacccggagggaggcatagaacttgagagcccgcccgccggtcgtggtctccggattccccaggaaaaagccgatcttttcccggatctggttgatgaagatgaagcaggtcttcgaccgggcgacgatggccgtcagcttccggagagcctggctcatcagccgggcttgaagccccatatgggcgtcgcccatctcgccttccagctcggccttgggaacgagggccgcgaccgaatcgacgacgacgacgtccacggccccgctgcggaccagaacctcggcgatttccaagccctgctcgccgtaatcgggctgggagatgaggaggttgtcgatgtcgacgccgacttttccggcgtaggtcggatccagggcgtgctcggcatcgatgaaggccgcctggccgccgcggcgctgggcctcggcgatgacatggagggccagggtcgttttgcccgtggcttccgggccgaacacctcgaccacccgtccgcggggaaatccgccgatgccgagggccaggtcgaaggcgatggatcccgtcgggatggcctcgattctctgggccgcgtcgcgttggccgagcttcatgaccgaacccttgccgaattgcttttcgatttgggaaacagccgcttcgatggccttgccccgggacacgtcgcgcgggctctgctcttcttctttcatgggatcctccggaccgggccgcacatcctaaaggacgctcgaaccgcctcttttttctcgtttccttttatcacattcgccgccgggagtaaaacccgctcagccgagaatgcccgagacaacgccgtcgtcggaaacatcgatccgctcggccgcggggcttttcggcatccccggcatggtcatgatgtccccgcagagagcgaccacgaatccggccccggcgctgatcgagagatcggtcacggtcagagggaagccgttcggccggcccaggagcttggggttgtccgacagcgaatactgcgtcttggccacgcagaccgggagcccggagaatccgttgtcctcgaaccgtttcagttttttccgggccggggattccagaacgacgcggtcggccccgtaaatccgccgggcgatcgcctccagcttctccggaatcaaggcctccaagggatagagaaacctgaactcgccggcgtcggaggacgcggcctccacgacctttgccgcgagatccaggccgcccggaccgccggcgccgaacacgtcgctgagggcgtacggcagccggtcggcggcggcccgggcggtgaaggcggcgatctcggcctggctgtccgccgggaaccgattcagggccacgaccacgggcaagccgtattggcgaacgatatcgacatgagcttgaaggttggcatacccgttatccatggccgcgatgttttcttgaataagggcgtcaagcttcactccgccgtgatacttgagcgaacgcagggtggcgacgatgaccacggccgaaggcggggggacggctccggagcggaccacgatgtcgaagaacttctccgctccgagatcggagccgaatccgcattcagtgacgacataatccgccagccggagggccagcccggtggcgatcaccgagttggccccatgggcgatgttggcgaacggcccgccgtggacaaagaccggtgtttcctcgagcgtctggacaagattcggccgcagggcatcccgcagcagagcggccatggccccgggagccttcagagccgcggccgtcaccggtttcagatcgaggccgcagccgacaacgatccgccccagccgggccttgagatcggccaagtcccgcgacaagcagaaaacggccatcacttccgaggcggcggtgatatcgaagccggattcccgggccattccgccgtacgtgtcctccaggccgataatgatttgccggagagcccggtcgttcatgtccacaacgcgcttccaataaacattgcggccgtccaggagtcccgccggcccgtcgaaatgcaatcggttctcgaccagggccgccagcaggttgtgagcggaggagacggcatgaaggtccccggtgaaatgaaggttgatgtcttcgccggggacgacccgggcttttcccccgccggtggccccgcccttcatcccgaagacaggccccaaggacggctcgcgcagggccgcgagggcttttttcccggcccgcgtgagggcatcgaccaagccaatggccgtcgtcgtcttgccctctccggccggcgtgggcgtcatggccgtgacgaggataagcttccccgccggccggccgggcggcccggccgccggatccaccttggctttgtaggttccgaattgaaccagattccccggatcaaggcccagcttggccgcaatttcaacgattggtttcatcgcaattcctccgcgtcgtctctgctcgggccgaaaaggccctcctgcctgccagtttaatccacctcgcgggcgaaatgaaggggtcagcctccggcgccggttttcgcctggaccgagtggaagaggagatcataatcggagatcaagccgtggtcggcgaagctgaaatagcgattgttgccgatgatgaggtggtcaaggaccttaagccccatgacccgggcggcgaaaaccagctccttggtgatttcccggtcgcaaaaagacggctcgggatcgcccgagggatgattatgggcgaaaatcaaggcggccgcgttgaagcgaagggcctccttcatgatttcccgggggtagacggcgctggagtccacggtaccctcaaagagcgtcttctcctcgagaatttggttcttggcatccagaaaaagaactttgaaattctcctttttcaggtcgcgcatcgtatgataaaggtattcgaacacctcccgggcggaacggcagtaggggcggcggagcatccggtccttcaggaaacggcgggccacctcctgaatgagccggatgccgaagacattggccgagccgatgcccgggatccgccgcaactcgtgcgtttcggcctcgagcacgccccgaagcgtccgaaattcccgcaaggccagccgggcggattcgcggcagtcgcggcggggcgttcccagcgtcagcaggagctcgatgacctcgtaatccagaaaaccggacaaccctcccttcagaaatttttcacggagccggcttcggtgcccggcggacgccggaccgggcggattcttggcccggggggaggggcggccggggggatggcggaaatcgtcgttcatggctccgcttctttttcggagagagggccgctcccaaacacccgctttctccacagggtagacgctccggccggagaatcgtcgcaatcgcccgccgcttccgggcggcggacgttcgccgggccgcgcgttactcccataatttatgatctctcaacgattctcggcttcggtaagatttttaaacggcaagatatatccgccttcggcgacttttttgatgacgggattcgggcgattgattctccggaacggctgtgatacaagaccgaaacgaggaggccttaatgaacggcgacattccggccctgttcgtcaccggaaaaactcttccggaggcttgggaaaatgcggttttggcgtgctggcgcggcggcgccgccgtccgaacggaatacgacaagcccggcgatccgccgagccgcgactgcacgatgatgtgggtggtcgaggagccgttcgccgagccccgcatccatcgggcgttccccggcggcctggaggatctggaaatctatcgccaggaggtcgtcgacggcatccacgatcattggatcgccccggaagaaggcaagtggacctacacgtaccacaagcggcttttcgcctatgagaccgagggggcggtgatcgaccagatcgaatccctcgtcgaaaagctcagccgttccggccattcgcgccgggcccaggcgatcacctggaacgtcgtcctggatccgccgacgaacgatcctccctgccttcagcgggtctggtgccggctgcttcccggcgacggcgggagcttcgtcctcaacatgaacacgcattggcgatcgcgcgacggcttcaaggccgcttatatgaacgtgttcgccttaaccgagcttcaaaaatcgatcgccggccggatcgccgaacggtccggaaaggaaatccgccttggacgctacgtggatgtggccgacagctttcacatctacggctcctatttccgggacttcgagggattcctcaagcttatcgaaaagagaagcttcgccgagcggacctgggattcgacctacgccgagccgatgtttgtcgagacgagggaaaagctccggagggaaaaagcggccaagccttaagccggcttcggcctgggcgacggatgaacgagccggccccgggggggggccgaaagcctcggcgggcccgggacttccgggaaaacgcctccgacaaaacctgcgctctgggaaagagatgttcatcgctcctctcgagggaacgatttcctttgtccgatttcaaaatccgtaaaaaccgaggcggctaaaaccgttcgagatcgcgctcggaaatcggcggcttccgtccggaaatccaacgcatccgccagccgtacttatcgaggtcgatgcttcctccggggccgatcttgacgccttcccgacggagccggcgggcttgttcgttcccgccgcgttcgggaggaagagaaacacggcctttggaattgatcacccggtgccaggggagtccttcgttttccgaagtcgagtgaaggatccaggaaacctggcgggcctgccggccgtccccggccagagccgccagccgcccgtaagagatgacttttccccgtggaatccggcggacaaggccgcacacgctccgggtaaaaggaagaaggctccgtttcgactctgatttcatgattttcctgatttcgttccggattgaattatataggacgattcgacgaaaaaaaacgcccgcctctttccggggaaacttacaaagcccgggccgggagaaggttcgccggggttttccttccagatcaaactccccgcgccttttttcccagccgtttaatcggcgctgaccggcctgcccgcttcttttttattgatcgggctcttttcctcgccttccccatgattatctcaagcctgggaagaaaacgatgccgaaaaaaaattccgccgcctcttttcaacggcttcgcccgctcccctcctccggcttcccgtcattcagaacccgaacaacgcggatccaaatcattcccatcgagaaaagttcgaaaaccgggataaaaatgaacattatttgaacattattccctgaatggtcgacatttttgtaattatataaataataacgagatacacacatttcattcattattgttcattatttaaacgatataataatcagcaaacttatcttctagcaatttatttctaattatcccatgcatttatatacattgattatgttggtctatttattgctgattaattagatatgtggatacaaggagacgtcaggatgaaaaaaacggtccttgctttcctaattacttttcccctcctttccggcgtctccttggctttccccaccctcaacgaaacgcccctccttccttccggaacgctttcagccctcgccctcccttccgaacctgcccctgaacccgatttctcctcgatcaccctcaatccacggctcgtcgtcctcgcctccgctcaatcccttatcgaaccgtccctccgccgctcccgcttcgccgattccgtcttcgacgccaccctcatctccatggtcgccctgaacatcgccgattacgtgtccacccgggaatgcctcaagttcccccatctttccgaaggcaatcccatcatgaagccgttcgtcaagaacgatctggcgttcgccgcggtcaagggcggcttgaccctggccacttacttcggaaccaaggcgcttttcaagaaaagcaaacccctcggctggatcgcttccctggcctccaacctggctctctcctacgtcgtttccaacaacttccgcctcctccgcgaggcccgaagccgttgaatatgaagttcccccagtcttggtccgccgtttccgccgcgagcctggcggagtggaaaacagaatatgcttcctttctcgccggatcctcattcctcaagtccggcgaagcggccctggccgcggaagtcatggaaaaaacgctgctcttcggcttggcggcgatcgcggcggacgaaccgctagaggctcgcttctccatcgattcgaaaattctctcctgccattaggcgccaaggaagcgtgaaagggggagcttcggctccccctttcggggcagggagatcaaagatgtttcgttttcccgccgcctcgtaaaagatcgaggactttcttcacgtcctggtcccggtccttgcggcagaccaggagaacgtcgccagcctggacgatcaccgtgttctccaccccgatcaaggccgtcagctttcccggattgcagatgatgttgcccctggactcgacggcgaccacgtcgccgcgccgggcgttcccctgatcgtcccggggccagatctctcccagggccgaccaggcgccgacgtccgaccagccgaaatcgccggcgcagacgagcgttcccttggctttttccatcaaggcgtagtcgatggagagcgccgggatttcctcgaagatccggatcagggttttggacgatttcttgtcgagggcttcccgcgttctttgccaaaagggaaagaaggccggggaatccctctccaaggcccgggcgaaaacggatgcccgccagaggaacatgcccgagttccaggcgtaatcgccggattccaggaaggcggcggccgcctcgcgcgtcggtttttcccggaaggcccgaacggggtagaacggctcgccggcgaagtcccgcccgccggcccggtcgaattggatatatccgtatcccgtggccggataggtcggctgaacgccgaaggtcacgagcccctcggttcggaaagccgcctcggccgcggcctcgagcttcttgagaaacaaaggctcgtcgaggatcaaatgatcggaggcgaggacggcgacgaccgcctcgggattccgccggtgcacgtgggccgtggccaggatgagcgaggcggccgtgttccgggcgcgcggctcgatcaggacgttggccgccggcagggccggcagcagccggcggatgatccgcgactgaggagcatcggcgatcgtaaagacgcgccggccggggacgatccggcggatccgccggtacgtttcctcgatcatcgtcttttcggagacgatgggaaggaattgcttgggccggcgcttccggctgagcggccaaaagcgggtgccgctccccccggccatgatgacggcgtgaagatcgacggcggatttcatgacggccgttcgagcttgtggatcgcccgctcgacggaagccttgatttcccgctgaatggcctccaggtcctcctcggtttccgcctcgaaccgcaggaccagcacggcctgggtgttcgaggcccggaccaggccccagcccttgggcatgatcgcccggacgccgtcgatgtcgatcaccgggtatttgcccgagagctcgcggcggacctcctcgacgatcttgaacttgacttcctcggaggcgtacacgcggatttccggggtgctgtatgtcttcggcagggccgccagcatttccgaaagccgctggggggaacgggcgaccagctcggccacccggagggaggcatagatggcgtcgtcgaagccgaaccaccggtcggcgaaaaacatatggccgctcatctccccggcgagcttggcatcctcgtccttgatcttcttcttgatgagggaatggccggctttccacatcaccgccttgccgccgagccgggtgatttcgtcatacaggaccttggtcgccttgacctcggaaatgatcaccgccccggggaaagccttcagaatgtcccgggcgaaaaaaatcaacagctggtcgccccagatcaagtgcccctcgtcgtcaacgacgccgatccggtctccgtccccgtcgtacgccaggccgagttcggctttcgtggccttcacccgggacacgagcgattgcatggcctccggcagggtcgggtcgggatggtgattcggaaaacgcccgtccatgtcgcagtagagctcgtccactttgcagccgagcttgcggaacaagggggcagccacgaccccggccgttccgttcccggcgtccaggacgaccttgagcggccgggccagcttgaacaaaccgagaacataggcttcgtattcgggcttgatgtcgtacaagcgataagatcccttcccggccggggcataagcgccgtttttaatgatccggtggatctgctggatgtcgtcgccgtagagggtgtcctgcccgacggtcatcttgaatccgttgtactcggggggattgtgggacccggtgatcatcactcccgattccatattcttgtagtagccggcgaaatacagcagcggcgtcggaatcgtccccagatccgtgacgtcgcagccggccgcgcgcaggccggcggccatcgcttcggcgaaggccggcgagctcaggcggcaatcgcgccccaccacggtctcctttttccccttggacctgaaaaacgtcccgatcgcccggccgagcgtctggacgacctccggggttagatcgacgtcgacgattccgcggatatcgtactcgcggaaaatcttggcgttgatcggcatgcggacctcctcttcccgctctccggcggtcatattttatggtcggatatctcgcggaaccggtctttgaccaggctccattttctctgcgctcccaggatgtagtcgaccagctcccggaaagcgccttcgcctccgcgccggcggcagacgaagtcgaccctcttgcggaccgccgccacggcgtcggccggagcggccgaaaaaccggccgcttccagcaccgctaggtcgttcaaatcgtcgccgatataggcgatctcctcgggacgaaggccgtgcttggccaggatctcccgaaagaccggctccttgtcgatcgctccctggcggagctcgtcgatccggagcctcgcggcccggccttccaaggctttcgaatttttcccggtgatgaacccgactttcaagccggccagccgggaaatcaaaacgccgagcccgtccttggtgttgaacgacttgatttcctcgccgtcgggatacggcgtcagggagccgtcggtcaacgtcccatcgacgtccgccaggatcatgcggacgcggcgggcccgcccgcgtttccccatcagaacatctccgtccgccagaggtcgtggaggtggatgatcccttccactttcccccccgcggccagaaccacgagcgacgtgatccggttctgctccatgacattcaaggcttcggccgccagatcggtccgggtcacggtgagcggaccggtcgtcatgcattccccggccgtccgagacagcagcgtggccccgtacttccggatcatgcgcctcaagtcgccgtcggtgatgaccccggccaggcggccggcctcgtcgacgacgctggtcatgcccagcttcttggcggtcatctcctcgatggcctcgctcatcagggcggacggcccgacccggggaacggcccggcccttgtgcatcagcgtctcgatccggagcaagcgcttgcccagggcccccttgggatggacggaggcgaaatcgcgctcggtgaatcctttccgtttcatgacagcgatggccagggcgtcgcccagggccagggccgcggttgagctggccgtcggcaccaatccgtcgggatcggcttccttgctgacccgggcttccaggacgatgtcgctgtaacgggcgatatgggatcggggcgccccggtgatcaaaatcagcttcaccccgagacgcttgatatagccgaggaggtcgatgatctcgcgcgtttcgccgctgtacgagacggcgatgacgacgtctccctccaggatcatgcccagatcgccgtggccggcttcggccgggtggacgaaaatcgccggcgtgccgcagctggccagggtggccgcgattttccggccgacaaggcccgacttgcccatgcctaagatgatgaccctcgttttcgtccggtacaggagattcaccgcccggacgaacggctcgccgatgttctcccggagacgggcgaccgcccgggcttcgacgtcgagcacgtcccggcccgcgcggatgatgtcttctttcgtcatctcggctctcccagcgctccgtagactcggagcaggacgttcatcagcgcttccacttcgtcgatcggccaggcgttgtccttgtcggaccgggcccgggccggatcgtcgtgaacctcgaggaacactccgtcggcgccggcggccacggccgcccgggccagggccgggatgaaccgccgttcgcctcccgaggctccccccgcgccgcccggcttttggacgccgtgggaggcatcgatgacgacgggaaagccgagccgcttcatgtccgcgatcgagcgcatatcgacgaccaggtcgtggtaaccgaaacacgtcccgcgctcggtcagcatgatccgggcattgcccgtgctgaggatcttctcgacgacatgcatcatgtcgccgggggcgaggaactgccctttcttgacattgaccggttttccggtccgggcgacggccaggaccaggtcggtctggcggcagaggaaggcggggatttgaagaacgtccaggacttccgcggccggaacggcttgggccggctcgtggacatcggagagaaccggaatcccggccgtttccttgaccgcccggagaatctccagccccgcccgaagaccgggaccgcggaaggatcggagcgacgtccggttggccttgtcgtaggaggccttgaaaagaaggggaaaatcgagccgcgcggcgacggccgcgagtttccgggcaagggcgatcgttttcgcccggctttcgatgacgcagggaccggcgatgagaaacaatccggccggcggaacggcggaccgcgccgcctcaggccgcgcgcttttcttggcgatgggcatagctggctccgatgaacgatttaaagagcggatgaggccttaacggacgggacttgaattccggatggaattgacagccgagaaaccagggatggcccggaagctcgacgatctcggccaggccgtaatcgggatttttccccgaaaaccgaagcccggcctcgcgcaaaggcttttcgaaggccgggttgaactcgaaacggtgacgatggcgctcccatatttcctcattccgataaattttatatgccaaggaggatttctccaggcggcagaggtaccggcccaggcgcatcgtcccgcccagatcggtcacgcctttcagctcgcgccatttaaaaaagatcttcgccggggtcgcttcgtcgaattccgcggaatgggcccccttgagtccggcgatgttccgggcgaactcgatcgtcgcgcactgcatcccgaggcagatgccgaacagcgggacgttgtgttcccgggcgaaggtgaccgcccggattttcccctcgatgccccgctggccgaagccgccggggatcaggatcccgtctttcgttccgaggatcttttcaagcttccctttctccacattttccgcttcaatccattcaatgacggccttgagatccccggccacggccccatggatcaaggcctgcttgaggctgaggtaggaatcctcaaggccggcgtattttccgacgatggcgatgtcgacttcatccctcggttgattcatccgccggacgaacgttttccactgggaaagacggcgcgtccgcgaggtcaagccgaactggcggaggatgatcgcgtccaacccttcctcggcgaacacgagggggatttcgtaaatgttctcgacgtcccgggcggtgatgaccgcgttctccgggacgtttgtgaacatggagatcttcgccttcatttccggcccgagactccgatcggtccggcagagcagaatgtccggttgaatcccgatcgcccgcagctcccggaccgaatgctgggtcggcttggttttcagctcgcccgacgtctggacgtaaggaacatacgtcaagtgaacaaaaagcgtgtggtcggccccgcaggacagccgcatttgccggatggcctcgagaaagggcaggctttcgatgtcgcccacggtcccgccgatttcggcgatgacgatgtcgttggactcggcgaccgatttgagggcgttcttgatttcatcggtgacatgggggatgacctggacggttttgcccaggaattcgccccgccgttctttttttagaatgatgtcgtagatccggccggccgtccaattatgatattttgtcgtctgcgttgacgtaaatcgttcataatgaccgagatccaggtctgtttcggccccgtcgtcggtgacgtagacttcgccgtgctggtaggggctcatcgtccccgagtcgacgttgagatacggatcgagcttgatgatggtgagcttaaatccacggctttcgagaagacggccgatcgaggccgcggcgatccccttccccagggcggaaagaactccaccggtcacaaaaatgaatttggtcaccgtgatccgctttccttgaggaatttctcgaccctcattatatcttcgggcacatcgacgctcaaggtcgggcgggggatttcaatcatccggatccgaaatccgttctccaagacgcgaagctgttccaggcgctcgatctgttcgaggcgcgaaaggggaaggcggccgaaacggaggatgaaatcccgctgataaccgtaaagaccgacgtgctggaagaaaaagtcggacgcgccggccgggatgagcgcccgggaaaaataaagggcgtgccccgaggcgtcgaccacgaccttgacgcggttgggatcggccgccgccgagatgtcctcgattcgggccatcacgctggccatcggcaggcggtgatcctggagggcttcggccaagccgtcgagcgcggcccgatcgacaagcggctcgtctccttggacgttgaggacgacgggataatcgagagcggccgcgacctcggcgacgcgctccgttccggaggcgtggtcgggcgatgtcatgacggcttccgctccgagagcccggaccgtttcaaaaatccgattgtcatcggtggccgtgatcacccggtcgatcgaccggcacacccggacgccttcgatcacccgctggatcatcggctttccggcaatgagggcgagaggcttcccgggaaagcgcgtcgagccgaaccggaccgggatgacggccaggactttccgtttcattcgctttccttgtcctccgcggcaggctcggccgagacgggggcctcctccgtccggcactcggcctggagatacgccgactcgtcgatcatgatcttcggagcgatgatcgttccgaaaatccgccctcggccgtggacttcgatttttttctcgcaccggatccggccgtggaattcaccgttgacgacggcgtgtccgacgtgaatctccgcctccacgtttccctcctcgccgatgatcagggtgtcttccgattcgatggtccccttgaaatgaccgtcgatccggaacgatccctcgaattttaagactccctggaattcggttccggtgtcgtacaatccggacagctcggcccggttcgagacccgtttttcctttccttccttcatgagcgaatccccttgattaattcatagatgcgattcagctcgccgagcgaaaaataagagattttaatcaccccttttttaggcgttccggaaatgacgaccttggcccccaggtgttggagcaagtcttcttgaagattttgaagatccggatcgagcttcgcccggaccggagtttttttctttcttcgccgggagacatagtcctcggtttcccggacgctgcggcccgagtcggcggcccaccgggcggcttcgacctgggccttgggatcctcgatccccaggatggcccgggcgtgccccatggcgattttttcttgaagcagcatcgactgaacggcctccggaagattgagaagccggagagtgttggagaccgacgtccggtccttgcccaccttctcggccacctcctcctgcgaataccccaggacttccaccatccccttgtaatatcgggcgacctcgatgggattgagatcttcccgctggaggttttcgatgatggaggcctccatctgtctttccttggagatattccggatgatgaccggaaccttgcggagtccgactttttgggcggcccgccagcggcgctcgccgatgatgatgttatagccgccgccggccggaacggcgatgataggctgaaggattcccgactcgcggatcgactgcgccagctcctcgatcgcctgttcgtcgaatttcatccgcggctggaacgggctcggactcagccggtcgatgtccatctcggtcaaggattcttccttgagaatgccgtattcctccgggatgaaggccttgatgcctttgccgagagcttttttcatttttccaaaatctcctgggccagggatagatacgcctccgccccccgcgatctcggctcgtatagaatgacgggctttccaaaggacggcgcttcggccagccggatgctgcgggggatgacggtccgaaagaccagctctttgagcgatttccggacctcgtcggcgacctgccgagatagattggtccggtcgtcggccatggtcaaaacgactccctcgatcctaaggccgggattaaaatatgtccggacttcgttcagggtatgaaggagatcggggattccctccatgcagaagaattcggtttggaccggaatcaagacggagtccgccgccgtgagggcattaatcgtcaggaaacccagggaaggaggacaatcaatgaggatgtggctgaaccggggccgggctttttccaaggcgtttttaagtttattctcccggaattcggctttgaacatctccgcttccactcccatcagctccggtgaacaggggcagagatagaaattgtccatttcggtgcccgagatgcattccatgatgtcccggccgttcatcatggcctggtagatcccggcggagtcggccttgggtttccccaggccggccgaagccatgccctggggatccaaatcgatcaagagaaccctcgatttcttaagcgccaaagcggcggccagattgatcgacgtcgttgttttccccaccccacccttttgattcgcgacggcaatgattttattcatcttccctggtcggctttcccggcgatgttccacgtggaacattccccgccgagacgtgaataaagacgttcatcacatccgacggcgtcagccccggaattcgtttcatatccccgatggttttcggcttgtgcttgttcattttttccacggcttcccggcccaagccggggacgccggaaggcttgaatcccgccgggattctcatcgcctccattttcgtcaagcggacgatctcgacctcttgtttcctcaggtagccctcgtatttgacttcagccgcgatccggcgggtttcctcaggagaaagggcctccggcatcggaacgtattctagcacattctcaaactcgatatcaggccggcggagatactccttgagcgaaatccggggcttccccgccggtgtgatcttggttttttccaaaaaggctaaagtcgacgacagccgcttttcctttttttgaaagcggacgaaatctctttcggaaagcaggccgagctccctcccataaggggaaagcctcgaatccgcgttgtcgatgcggaggccgagccggtactccgcccgggacgtaaacagccggtagggctcctccactcccttggaaatcaggtcgtcgatcaaaaccccgatgtaagcctggtcacgacggagaacgaacggttttttatctcggagcttcaagaccgcgttgacgccggccgccaagccttgagccgccgcctcttcataccccgaagttccgttgatctggccggccagatacaatccctcgacgggaagagactccagcgtcggcttcagctgggtcggggaaacggcgtcgtattcgacggcgtaagccggacggagaatcaccgcctccgttaatccggggattgtccggagaatgtcgcgctgcgtttcgtaagggaggctggaggaaagaccgttgacgtaaatctcggacgtcgccagcccttccggctcgagaaagaactggtggcggggatgatgcccgaacttgacgaccttatcctcgatcgacgggcaataccgcggccccagccccttgatccgtccggcgtagagcggcgacttgtcgagatcgcgccggatcacggcatgagtcttctcgttggtataaccgagataacagacgactttgttttcgagccgcgtctccgtcctcaacgacatcgggaccggttcgtcgtcgccgggctgagcctcgaaagccgaccaatcgatcgtcttcccgtccagccgcatcggcgtccccgtcttcaagcggaatgttctcaatcccgccttccgaaccgcggccgccagctcgacggatggaggctcgttggcccggccggcgggataggaggcctgcccgacatggatgagtccgttgaggaacgtgccgggcgtgaggatgacggcctcggcctcgatcgaccggtcgtcgccgcagacgacgcctcgaatccgggacccgacgatatccagcccgacgacgatcccctgatagaggctcaagccggggattttttccaactgttccttcatcgcctcccggtagcgggatttgtcgcactggacacggggggcttggacagccgcgccccggctccggttgagcagccggaaatggatgccggttgcatcggccagaagtcccatcaatccgcccaaggcgtcgatttcccggacgaggtgtcccttggccaatccgccgacggccggattgcaggacatttgggcgatggtttcgaaatgcgttgtgatcaggcagacggaacaccccatggcggcggcggccgcggccgcctcgcagccggcgtgaccggcgccgcaaacgatgatctcgaaggattcgtcggccatcttgtccggtattataccctgactcccgaaaattcggcggttcgacccgctcttgggagcggccggccgccgcccgacagcgcccggtgaagagaaaggcgagacttatttcccgatgcagaatcgggaaaagacatcatccaggatatcgtcgggccggatctccccggtcaaccggccggtgagggtgacgatttcgcgggcttcctcggcggccaattcgatcggctggttcgaggcgatcatctccttggcccggagaaggcgagcggcgatttcctccagaagaagcttatccctttcccgcaagacgatgatgtctcgcccgggaatcagcgggaagaaaacgtcgtacatcattttgcggaggacgtccaatccatcgcccctcagggcggacacggcggctacgggaagatcgggaaaacggcgggtcacctcggccggagtcgtcttctccggaagatccgttttgttcaggacgaggatgatttttctcgaccgataggactcgatgagcgcggcgtcggaagcggaaagccgccgggatccatccaggagaagaagaaggccgtcggcctcggccgcgatttttttcccgcggcggatgccctcgcgttcgatcggcgatcccgcccggcccaagccggccatgtcgacgagaaggaaggacgcgtccttgatacggacggtttcccggagaaaatcgcgggtggtccccggaaacggagtgacgatcgccctcggctcttcgagcaacccgttaaacagagtcgattttccggaattcacccggcccaccaaggcgatcgttacgccccggccgagggcctgacccatttcgtagcttcggacgagacgatcgacttctaaatatattttatcgattttatcgatatagtgttttttagccgcgggacgtccctcttccggaaattcaatgtcggcttccagccgggcgacccagccgatgatttcccggcgcacggccgcggcttttctcgacaacgcgccgttgaccgtccggaaagccgatttggcccgggccagagaagccgaacggaccaagtcatcgaccgcttccgcttgaaggaaatcgatccgtccgttcaagaacgcccggagggtgaactccccgggcaaggccggccgggctccccgccggacggccagccggacgacttcctccaggatgaccgggcttccgtgaaggtgaagctcggcgacgtcctctcccgtgaaggagcggggcgcccgaaaatggagaaggaatccttcgtcgaagggccggcggtcggccggatcgacgacctcgcctaaaacggcccgtcccggttccccgccgcgccggtcctttttcggccggaaaagcgttcgggcgattttaagggccgccgggccgctcaatcggacaacgccgattccgccgcagcccggaggcgtggagacggcgacgatcgtttcggagagagagaggtcatacacggcggcgtgttccggaaaagcccggccgcgggcgtcagcgggcgcgcttgctcaagggatagatcttgacccgcttcaaaaaaccctcgcccaggctttcgctggtgatcccggggacttggttggcggcgatgtggacgatccgccgctcgtacggattcatcaggtccaggatctcgtttcggccggaatcggccacccggcgggccacgtcgagggcgtaatcccgcagcgacttttccttgcgctttcggaagaattcgcaatccacttggaccttccggtcggagatcttgttgagaaggtgctggatcgccaggagcaaggccccgtctttccagaggagaatttgccggtccgcgccgccgaagatgacgaagctgatgtcttccttggttttgatttcgtacgtcagatccagcggaaagacgttcatcaggcggtccaaaaacacggtcaggtcgccgttcttggcgaaccgcttgacccgggcccggatgacgacttccttgccgagaccgaagaggcgcgttttctcggtgacgacctcgtattcgaactcggtccgcggaaccttcagcttgtgttcggcgtggaggatggcgtcttcgaggttcttccccttgaactcggggatttcctcgaccgccgtcacggcgtcatttttttcttgattttccatgggagacaaccttttttttctgcatcatccggttcatcagggcctgttggccgatttgaaggacgttggacgtcagccagtagaggaccaaaccgctttggaagttcaggaaaaagagggtcatgaccacgggcatgatcagcatcatccgggcttgggcggggtcggccgacgtcggggtcatcttttgactgatgaactgcgtcacacccatgaggatgggcgtgacgtacgtggggtcatggacggagagatccttgatccataggatccagggactgtggcgaagctcgatggccaccgtcagcatgcggaagaatccccagaagatgggcagctggatgagcatcggcaggcagccgccggccgggttcaccccgtgctccttgtagagcttcatcatctcctcgttcatctgccggcgctgctcgatgtcggtcttggccttcttgtacttggcccgcagcgccttgatcttcggctgaaggtcggccatgcgggccatcgatttggagctgctgtacgtcaaggggaaaaacaagatcttgatgaggatcgtcaaaacgatgatggcgaatccccagttgggaaccactttgtggatcgcccggagggagacaaagaggatttcggtgatgaatccgaacattccgtagcggacgacgcgcttggtctcggatcccagggcggtcaggactcccatttccttgggaccgatgaagatcgtccggggggccgaggccgccaggaaaaagaagggggtcttgccgttttcgaagcggaggaaggacgccgagccggaggcggtctccggaaggaagatcgtggcgaaataattgtcgtcataagccgaccacgtgaggaagttgaagacgctcgattccggcttgtacttcttctcctcgacccggtagaccttggttccggccaggaaactcgccccggctcccgcgccgaaccgctgtttcaattcggcttccgacggattcccgcagccggggccccagacgatccggacgtcggccggccggccgccgcggcggaccgtcacggccgccccgacgtcatagcgtccgccggtgaaagtgaatgttttttcggcctcaaggccccgtccgtcggcgtaccgaaaacggagaacgcctttttccccgtccttcaagctcaagttcccgcccgtcgcctcgtacaaggccgtgttcaggggggtcgagcgaagctcctcgatcgtcgcccgggacggatcgagcgcctcgagaagggccagcggctggacgcccgacgcttccgcagccgccgggacgagctcgagagcctcgtctttctcgttcttatgatgatgaagcttccagctcaagaggacgccgcccttgttggtccagcgggcggtgtaaagagaggtggaaacgatgatttcctcctcggtctccgcattcaaggcttccgcggcgtccgaggcgcgctcctcggccggggctgtttcggcttcgggccggccggccgtttccgtctccggagcgggagcagccgcttgggcggcgaccggctggggagggggcgccgtttccggcgcttttttcacaaagacatattgccagagcagaagaacgccgagagaaaggacgatcgcaagaatgatccttctggtttccatatcagtgatcctttttcagggaacagggtcgagtcccccggcgtggaacgggtgacaccggagaagacgtttgagcccgagcccggttccccggatcaggccgtatttttcgatcgcctggcaggcgtactccgcgcaggtcggataatatcggcagtgcgtccccagcaaaggggagaccgttcttttgtagaggcggaggagagccagggcaaggcgtttcatcggagggatttctcccgggccagggaggcaagaaaagccgcgtattgctcgcaaagctgcggccacggagcgtcggcgcattcggctcgggtgatcaacagcatgtccagggacattttcaacgactctttgttcctccgaaaaagctcccgggcgcgccggcgagcccgattcctccggacggcgttgccgaccttccggctggagacggcggccattcgcggataccccaagccgttggaaagataaacgatcgtgaagtatcggctccgaaagctccggcccctttggtaaagcgccgaaaaatccgatttttttcggatcctctctcgaggtccgtaagaatcgctcattcagccgcgagacgcttgcgccctttcgcccggcggcgcttgatgaccttccggccgccggccgaactcatccgcacgagaaatccatgcgcttttttacgcttccggttattaggattaaacgagggcttcatgatcacaccttacgcaagaataaggcgcctatcttaatcgaccccggcgacgatgtcaagccggacgcgtcctttccggcatcgggcaaggcgattattcggcaatattaaaggattttcgaagcgaaagatatagcaattaacaatcgagcaaagaattccacttattgaacactttttttctttagcttaggttcttattttatttgttttcaatgtttttactaacttttaataattgtgtttatttattgttcttatttaaatacagctcatttcattcattttcatcttattttcttttttttcaatgttttatgaatgtttttatatatggtctattttttgctttctttatgttcaatgatacaaggagacgtcaggatgaaaaaaacggtccttgctttcctaattacttttcccctcctttccggcgtctccttggctttccccaccctcaacgaaacgcccctccttccttccggaacgctttcagccctcgccctcccttccgaacctgcccctgaacccgatttctcctcgatcaccctcaatccacggctcgtcgtcctcgcctccgctcaatcccttatcgaaccgtccctccgccgctcccgcttcgccgattccgtcttcgacgccaccctcatctccatggtcgccctgaacatcgccgattacgtgtccacccgggaatgcctcaagttcccccatctttccgaaggcaatcccatcatgaagccgttcgtcaagaacgatctggcgttcgccgcggtcaagggcggcttgaccctggccacttacttcggaaccaaggcgcttttcaagaaaagcaaacccctcggctggatcgcttccctggcctccaacctggctctctcctacgtcgtttccaacaacttccgcctcctccgcgaggcccgaagccgttgaatatgaaccgtatcctggaaacactggtctccacgggcccgatccgttccgttccgccctcaacccttccgacgctggacgagctcgtcggcgaatacatcctgatgctgctcgccctgacccatcacaatatttcccagacggcccggatcttgaacatttcccgcacgacactctacaaccgcctccgccggcaatcctcctgaacgaagcgccgcggctccgctccaagcctacctttttctttttcaatcggttctgttttcaagcggctttttcccgttcggccccccgttcgttcgtcggccgtcgaccggaaaacaagtccgtcggccggcctttctttttgtttgacgaaacttcctaataatgctagaattaacccctcatggaatgtttcaagattggtgataaagtgatttatcccaatcaaggcctgggtctggtcgtcgacgtccaggaacaggcttacaacggcgaaaagttccccgtttatcatctccgtctcctgtccagcaacaccctggtcatggttcctttttcctcctgccaggaaatcggcatccgcaagctgatcgccgagggatcggtcaaggacatcttcgatttcctgaagaacggagaaatcgaagtttccatgaattggaaggggcgctataaggaacacatcggcctgatgaaatcggggaccgtcctggacatggtcgccgttctcaagagccttcattacctgagcttgatcaagcccctgtccttccgggaaaagaagatgatggaaaaagcccgggaactggtcgtttcggaaatcgcccaggtgtcgtccatgccggccgcccagatcgaaaagaaaatcgcgtcgattctatccacttgctttaaagacgttaaagtcggccttgacgtctgaccggcggtcatgaccctttccttgatcctcttgttcatcctctgcatcatcctgagcgcctttttttcctcaagcgaaacggccttcatcgccgtgaagccgcacacccttgattacctggaaacgaagggctcgccgcgggccggccgggtaaaaaaaatcctttctcgtcttgaagatttcctctcggccgtcctcatcggaaacaccctcgtcaatgccgccgcggcctctctggccacggccctggccgcctccttgatcccaaacaggaacacggccgtcctggcggcgacgggcgggacgacgctcatccttcttcttttttccgaaatcaacccgaagatctacgccgcccgccatccggacaagctggcccttttctttgctcccgtcgtccgtcttttcctcgtcctgttctatcccctggtcgccgttttcaccttcgtctcccggcggctgttccgatccggggccaagacatccgaagccctctcccgggccatggccgaggaagaggccaaagccctccttcattccgggatcaagggcctgcccgagcatcgcaaagccatgatcacggaaatcgtcgacctggcccgccggccggtcaaggaaatcatgaccccccggccccggatcaaggccatcgaggcctcctccagccgggagcaaattctcaaaacggtcgtggccgagggcttcagccgcttccccgtctaccgcggacggatggatcacatcgaaggcttgatctacaccaaggacctgatcggctacctggctcacgaccggccctttgatcttggggccgtgctccgacctccctttttcctccctgagtccgccccgatcgaaaaagtccttcttcaaatgcaggacgagggcgttcagatggccttcctcgtggatgaattcgggaacatggaaggcttggtgacgatcgaagacatcatggaggagatcgtcggagaaatccgggacgagtacgacgaccgtgaggaggattggcacgcgcccctggaggacggggctgtcctggtcaagggctcggccgggatcaacgacatcaacaaaacgctgggctggggccttccggaaagctccgaatacacgaccttggccggattctttctccaggaattcggacgcattccccgggagaaggacgttcttctccacaacggccgccgcttcatcgtcgtcaagatgaacaagcggcacatcagccagatccgggtcgaaacatgaaagtcctcgccgtcaaccgggccgcccggttcaactacgagatcttggagacgttcgaggccggcctcgtgctccagggcagcgaggtgaaatccgtccgcgaaggacggatcagcttgaaggagagcttcgccgacatccgcgacggagaagtcgtcctcgtcgactgccacatccatccctacgaagccgccaaccgctggaaccacgacccccgccgcgtccgcaagcttctcctccatcgccgcgagatcaagcgcttgaccggcaaggttcaggaacgcgggctgacgttgatcccgcttcaagtcatgctcaacgacaagggtctcgttaagatcgaaatcgccctcggcaagggcaagaaaatccacgaaaaaaaggaagccctcaaggagcgcgacatcaaccgccagatccgggcggccctcaagtcaggcggacgctgaacgcgcggcccgccggagcgcctcggtcatgctggccggatcggccggcgttcggccggcgatgtcgaaggcggttccgtgatccggcgacgtccggatgaacggcaggccgagggtgacgttgattcccgtttcaaaggcgatcatcttgaaagggatgagcccctggtcatggtagagcgcggccacgatcttttccggacggccgagggccaggcggaaaacgacgtccggagggaacggaccccgcacgggggtccccgccgcccgggcttcggcgacggccggggcgatgacgtccctctcctccgttccgagaatccccccctcgccggcgtgcggattgagtccggcgaccaggatttcaaaagccgggccctccgcccgggccggaggacattccctcaggatgcggaacaggcgggccagggccggccggttcacccgggccagcgcgtcccggaggggaagatgatggctgagaagagcgacggtcagcttctccgaccagaagctcatcaccgcgtcgggaaaaaaggattccaagtattcggtatggccgcgccaagggattccggccaaattccagccgaccttggccacgggcgcggtgacgagagcgtccatctctccgcggcgggcggccgccgccgcctcctcaaaccaggcaaacgacgcccggcccgcggaagcgccgggctcgcctttcttgaccggctcgcgcggtcctggcagatcccggagataaacgcccgcgccggcgcatgattcgtccgttttccaggaagggatctccgtggacaggccgaaagccgccgcttctttttccaaaaaagaacgcggcccgaaaagaacgtaccgagcggggggaagcgccccggaaaagaacagcgcccggagcgtcacttccgggccgatccctgcgggatctccaatcgagatcccgatccggggaaaggtcattttctttcgggctcgccgtcctcttcgggggattccttgccttcgccgagcttgtacaagtacttgatggcgttcttatagacgagcagattcggcgcgccgtttcggttgagcttgatgcagttgcggtcgtaccattcgacgtagccctcgaggatttcgccgtcttgaaaaacgacggccatcggcgtcttttttcccatctgcttgagatagtagtagttctcggcgccggtgtccgtcggcgggtacattttcttcggctgggactgcgtctgggaagcatagggtccgcgcgaagacgcatggcctgagtggccggcggaagacggccgtccgtggtggggcaccggcgtctcctggcctttcaggttctccttgatttcatttaaatgcggccggatcaggcgtctgttcatgagaagtctccgtattccctggcgtggcgtcggaatatttcagaaaatcgtttggatttattttatcacaaaccggccgaaaggatcaaacgccggccgccccgccggcgaaacgcgcggccctcatcataaagcagctgaatagcgccctttttgaacaagcatcccttctcctccgagccggccggattatgaccccgtaatcccgccccggtgacattctcctccaaggccgagctccccccgcgtcaatagcgcgggcggagggcctcccgccagacttcggccatcaggcggtagccttcccggaccggatggacttcgggcagaaggtcgggccggcggagaaaaacggcgtgttgatcgacgaccgcgatcccttcggccgcggcgatttcccggatggccgggttgatctccgcccggacccggcgggctgaggaggcgtcaaaattgggcggagtctccggaatatcgggaatcgtggccatcaggatcaaagggattttccccgaccggctccggaaggttcggaacaccgccaggatttgcctcatgttttccttgaacgcatccgtcggcgtggcgtcatggtcgatccggacatcattcgtcccgagctgaagaagaacgacgtccggtttttcctcgatgagcttcggcctgaacttgacgaggaatttcaggtattcgcccgaggtgtagccgctccggccgtaattcagaacgcgggccgcgatcccgtcccggttcaattcccgcctaaggaaatcgggataggccgccttcgtgagactgtcccccgcgcaaaaaacaatgacccctcggcccggcggcgcgcagctcatcaaaagaagcacagccgagaccaagatcgctccccgcccggccctgtctttcatggttttatcataacccgtcggccggttccggacaaggccggcggcccctgcctccccgccgcatccgatcctcaccgaaagccgcctcgagagccgggagcacgagaagggtcatcagcgtcgaagtcgccagaccgccgacaacgacgacggccagcggccgctggatttccgatcccgggccttgggcgaaaagaagaggcaagaggctgcagatcgtgatcgtcgccgtcatcaggaccggccggagccggttgaggcatccctggagaatcgcctcccgcgccgcaagcccctcctccctccgctgggcgacggccgagagaagaacgatgccgttgaggacggcgatgccgaagagggcgatgaagccgaccgaggccggaacggagagatacaggccggacagatacagggacagaacgcctccgatcagggcgaacggcagattgaataaaacgagcagggccggacgcagggcgttgaaagtcaaaaagagcagcagaaggatgagcccgacggtgaccgggagaatgacgcccagccggcgcatcgccctttgctggttttcgaactggccgccccacgataaaaagtaacccgcaggaagagagaccgagcgggcgacctcccgccgggcttcggccacgaatccgccgagatcccggccgctgatgttgcattcgatcccgatccgccgccggcccgcttcgcggctgatctgggaaggcccttccgagcggacgatcgccgccgcctggctgagggggacgatctctccccgttccgtccgcaagggaagagcgccgatcgcctcggccgagccgcgccgtttctccgcataccggagttggacatccaccgcccgctccccttcgtaaatccgggtgaccgttcggccgccgacggccgtttcgacgagcgtctggacatcctcgaccgaaagtccgtacctggcgatcctctcccggtcgggcaggacggaaagatacggctgcccggccacgctttccacaaccagatctgaagccccccgcagtcgtctcaaagcggccgcgatctcgccggccttggccgtcagagtgtcgaggtcctcgccgaagagcttgatgatgagctgggcccgggtgccggcgaccagctcgtcgatccggcaggcgatcggctggctgaaggaaaaggccattccggggatggtcgatacggcctcccgcattttttccgtcagctcgccgcgggagcgggccgaggtccattgccgtcggggcttgagaatgccgacatatccggtcttttccacgccccgggcttccagggcgatgccggtctggccggtctttcccaccacggtctcgatttccggaaaggagatgagcttctcctcgaccttccgattcatggccagggattggggcagcgagatcccgggagcgaattggacatccatgtcgaacgccccttcgtccatgatcggcatgaattccgttcccaagcgcgggatcagaacggccgacgcggccagcaagccgagggaaacggcgaagaccgttttcttgtgatccaggctccagcggaggaggggaagataagctttccgggcggcttcaaccaggaagatccgcttttcgccctggggtttgagaagaagacggcagaacgccgggatgaccaagagcgacaggcaaagagacgcgcagagggcgatcacatgagtgaaggccaggggggcgaacatctttccctcgatgccctggagggcgaagatcgggatgaaggtcagggcgatgatgagctcgccgaaaatgctcggcttgcggacctcgagaaccgccgagaggaccgtctcggtcttggtccttccgggtccgctttcagaaagatgcctctggacgttttcgacctggatgatcgtcgcgtcgatgatcatcccgatgctgatggccaggccgccgagcgacatcaggttggccgatagcccgcccaggcgcatggcgatgaacgtgaacagaaccgagagcggcagggccaggatgacgatgaacgccccccggaagctccggaggaacaggtacaggaccaggagaacgaagattcccccgatgatcaaggcctcgctgacggtgtggaggctggcttggacgatgtccgagcgcttgtagaaaggaacgatctggaggccggacgggagcaccgcgccggcgttgacttcggccacccgggcttccaccgcccggacgacttcgcggccgttggctccgcgaagcatcatgacgacgccgccgacggcttccccctttccgtccttgaccgccgccccctgccgcacggcccggctctttccggcggccgccacgtcgccgagaaagacgggcgtcccggcctcggatttgaggacgatccgctccatgtcggacgccgaccgcagcaggccgacgccccggaccagggcctgtccggcggcatcctccaagacgctcccgccgacgttgagattgttcctctccaaggcggcggccgcgtcggcaaccgtcaggccgtacttcaggaggcggtcgggatcgacggtgacctcatactggcggatgtgcccgccgaacgagttaatctcactgacgccgggaacggacttgagcaggggggccaggatccaatcctggaccgtccgaagctcggtcaggcgctccgcccgggcttcctcgtcctccccttcggggacggggccctcgagcgtgtactggtagatttctcccatggccgtggagaccggccccatggtgatttcaatcccttggggaacgcgctcccgggcttcgatcagccgctccaggacaagctggcgggcgaaatagatgtcgacaccgtcctcgaagacgaccgtgatcaccgaaagcccgaacttggaaacggagcggagctgggtcaggcggggcaggccttgaagggtcgtttcgaccggaaaggtgacgaatttttcgacttccagcggagacaagcccggggccgaggacaagacttcgacctggatgttagtgacgtccggaaaggcgtcgagcggaatcttgaggaacgaccagattccgaagccgacgagcaaggcgacgccgatcaggacgagcagcctgttgcggagcgagcggctgatcagtcgttcaatcgtgtccatgttcatccgccaggctggatttcagaagctcggatttgagcaggaagccgccggtcgtcacgacccattctccggcggaaacgcctccgacgatctcgaccaagccgccctcccggtccccgatttccaccggccggagccggaacgtcgtctctccctcccggacgaagacgacggggagggattggaactcctgcaaggccgaggccggaacgacgacggccgttctttctctcccggaggcgagcgcggcttcgacatacatccccgccctcaggcatccatcggcgtttccgacttcgatccgcccctccacggtcctggttttttcatccatgaccggtccgaggagaacgagccggcccgggaattcgcggccggggaaagcctgggtccggagaacggccgaagatcccgggcggacggcggccaggtctttctcgaaaacgtgaacgcgcgcccagagactttccgggtcggccagcttgaacagcggatcgcccggctcgacatgcgcgccggccaacgccggcgcctcgatgaccgttccggccaacggcgcccggacggagagaaaaggaaccggctctccggcctcaagcaaggcgtcgatctcctcgtcgccccagcccagggggaggagcttgcggcgggccgcccggaggaaggcctcggccgcctgaccttccgggccgtcccgaaggcgggcggcccgggccgcggcctgaaggacttccgcctgcgcggccaagaattcccggctgtagatttcagccaggatctggcccgggacgacgcggtctccggcgacggcggccgctttttcaatccggccctcgacccgggccgagacctcggccaggcggcgggcattgaattcgagctctcccggaacggagatccggccggccaagacggccgtttccactcgggccgcggagattcctccgtcagccgcggccgcgatcgagagaatcaccgttccagccggaacgcggccgttctcttgggcgtcgtgtccggcgtgttccggcaggagactccggcggcaggccggaaaaaccgcgatggccgcggccagcgccaggatcgtcgtgattttcgttcgattcatgatcttcctcccctcactcgccgtcctcgccggccgcatccattccggccagggcgacggcatacaaaaaccgggcctggagatgctcgaggcgcgcctcggccagcgagcggaaaagatcgagaagcgcgtacgcctcgatccgtcccaggcagtactgagtcaatccgttttcaatctccgcctcgatttcgcccaggagcctcttttcgaagacctcgacctgctcctccgcggcccgcgcctcccggtaagccgccctcaccaaaatgttgagccgcctctccacggcgacggtttcgatcaggcttttttcccgggcggcggccgcttccgcttgaaggccccccgtccgggaggagaaaagcggcaggctgatcccaagggaaaaaccccagcccttgatatttttgctggggacgaacagaccggcctcgaagccgggcttagcggccagagaagccatccggacttccgcctcggcccgggaccggcgcaatcgggcgagccggagcgagggacggtgtttcccagcctcggccaggacgcgatcgagcgaagcctccagaggcggaacagccaggcgatccgtcagccggaccggcttgtccggggaaaagccgagaaagagaagaagcccggtccgggcggaggactcgtctcttcgggcttcaatcagccggttttgcagccgggctttctcgaccttcgcccggaggacgtcggcataggccgcttccccgctttcaaaccggaccaagagagcgtccgtcaaacggtcgattaccgcgccgagagattccaaggcgatccgcgtttcctcggcgaagacggcctggtgataagccttcttgacccgggcggccaacaggagcccggtccgctcgatctccagggaggcggcttcctcgtctctccgggcgatttcgacccgggcggcccggagtccgggatattcgaattcccgctccacgccgagggcatattcggtttcgacttctccggctttgagcgtccaggggatgccggccgtcccgaacgtcagccgcggatcggggcgggcttccgcctgcctgcggcgggcggcggccgccttggcttcctcgcggaccaggaggatttcgggatgcccggccagggcgagctcgacggctccggccagggacagctcctcggcttcgtcgcggccggccgcggccgcggcggccaaggcggcggcgaaggcaaggccgagggacaggacggcggctcgacgccggtttttgagagggcgaaagatacggctcatgagactgactcctcaacgggaaagccgcctccagggcggccggggaaacggagggacggcggatgtggagataaaccgcgttgaccgccgacggcgggctccgggggacgttcggcgtcctccggcgggggaaggatctaacagcgtaaggcctgggcgccgggaggcaagacgccggcgtccggccgaggatcgagagaagaagcgaaggaccggaggcggaccgaaagcgggaagagggccggcgcatgaaggcggatcgcctccgggccgggaagcgttctcccttcgtcccgtttcaagacggctcggtcggcctgactccgaaacggctcatgaacgcagtggcaggcatcgatgaccgggccgtttggggaaagaccggcggccgccgcggcgaggtgctcgagacaatgctcgcactcgtcgcagagacaggcgccggacggaccggaaaattccgcggcgatccgcccgccgggccgatggcaaaagacgattcccggaagggcggcggccgccgaaaaaagaaattgcaaaacaacggcggccaggcaaaaaacaatccgccgcctctctgtctttcgtcgggatctcacggccctatgataaacttcgcccccttcgggggtcaagacgcgggcggccgatctcaaggcaacgtgaatctttccgcttttctcttcatctgagatcttcggtctccgcgggcccccgatagaccttccaccagcgagttggaggcgggatgaactcgggcggcttcggccggatcaccaggacggcctgaacgcgctggggccgctcggcgacctcccggaagcccaggccccgtccttcataacggatgaccatccggccgtcgaagcgaagcctcgccatggccggcctgcccggcatccggcgcgacgtctcctcgatcacaaagcgccgggaacgcggtcttaataagatccgccgccaagcgcgtcggcaatccggatatttcgattctccaggagcgttcccatcgaccgatccaagtcggccagggcgatgttgtagtcgatgaccgacttcaattcctggacttgggcggtcgtcaaatcgcgctgatactgaaggaccgtgtaattggtgctcaagccgaggcgaagcttctcctcctcggcggcgagcttcttttcggccaagtcgcgggcgatcttgtaggcctggacttgcttgaaggccgtctggacggtccggacggcgttgcggatttccaggacggcggcccgctcggtgtttttcagacccacgccggccgtctgcgtggccaactcggcctgggcgtaagccgcccgggacaggaccgtgttcaagccgatgtccagggtcaaggcgacgctccaattctcatatctgaatccgaagacgtcattccaggattccgaccggtaaccggggatggttccgatgatgtcgccgaaatactcgctgtcgtaaatcagccgcgtcccggagacgcccggactggcataggacgcgttgaagctcagggcggggaggagctggttgcgggcataatcgaggttgaggttctgggttttgaggttgatccgggagatccggagatccggtcttttctccatggccacggccagggcttcatccacctcgatcagccgttcctcgaaacggggggaatccagggcgacgatctcccggagcccctgttcctcttccggggtgaaattgaggaggtttttcatctggtcttcgttggccttgaccgccgcctcggccgctagaatgcccgcttccctcgtggcgacttcgctttcggcggccaggatgtccatgggcgccagcgtgccgatttccaccgaccgctggtttttcgccaggaaatcccgggccagctcgagcgacttgcgctggaccttgaggttttcgatgctgtacacgagattccaataggactggatgacgctgaagatcgtatcttggatggttttatgaagctggatctcggagacatccaggttgttccgggcgatgacgatctccatctgggtcatcttcagcccgaaattccgcaacaggggctgggagaaggagagctggagctggctgttgtaccgcggattaatcgtcgttccggtctggttggtgtccgtcatggccgacgacacgccgagggtcaccgtcccgcccaaggggatgacttcggtgatctgggcggaatagttcccgtatttcgtcaaggtctcgtcctgggattccagccaggaaaacgagggactgctcgagttcctcttcgtcaagccgaagctgaaattggggagaaacttttcccgggccttttggacggacaaggcggagccctggggcgtcaagacggccacctggatggagaggttgttccggagggcccggacgaggcattcctccagggtcagagagagggatcgggtcgtttcctgggcccccgccgtcgcagcgaggaggatcaaggccgcgggaacggcgatccgtcgcgggatatgcatcttctttctcctttggtcgtttcaacccttattcgtaccgcagggcctcgatcgggtcaagcttggacgccttccgggccggataaaatccgaagaaaatgccgaccgatccggaaaaggcgaacgccaggaggaccgatgaccaggataccatggtcgtgatggaggcgaaaacggggatgtatttaaggaccttggagacgccgatccccaggatgatccccagaagtccgccggcgaggctcaggacgatcgcttccgccaggaactggagaaggatgtcccgcggccgggccccgatggacatccggatgccgatctcccggatgcgttcggtcaccgaaaccagcatgatgttcatgatcccgatgccgccgacgagcagcgagatggaggcgatggagccgagcaggatcgtcaggatcccggtcgcttcggccgcgccctcggccacctcggacatgttccggacgacgaaatcatcggtcccgccgtcgggaatccggtggcggatgcgcaaaagctcggtgatttcgtcctgggcctccttcgttttcgcctgggaaaccgccgacacgtcgatggactggagatactccgagcgggagaggcggttgagggccgtcgtatacggaacgcagacaaagtcgtcccggctgccgaagccccccgattcccccttggacttgaaaaccccgagaatcaaaaagggcacccgggaaatgcgaatggtcttgccgacggcgtcctcgtcctcctcgaagaggtttttcttgatgtcggccccgatgacgcagaccttggccgctccgcggaccatgctctcgtcgaagaaagcgccgtcctcgatatcccacttgcggacgaggggatagctctctccggttccttggaccatcgtgttccaattgttgtttccataaatgagctgggcccgggtcgagacgctgggggagacggcctcgaccgagggcagctgcccgatggccttggcgtcctcggctgtcaagcggttgaattggccggtctgggtccgggcgccgcccatcatccgccagttgccggtgacgaacatcaggttcgtccccatggacgcgaactgcgattcaacggccgcccgggccccggctccgatgctgaccatggcgatgaccgcggccacgccgatgatgatgcccaggcaagtgagaaacgtccgcatcttgttccgggccagggcccggagcgaaacgcgcaatatccgaaagacgttcattcccgtgctccttggtcagtcttcccggacgacaaggccgtccttcatatggaggcggcgcttggcccgggcgccgatgtccggctcgtgggtcaccatgacgatgctgatgccgtcttcatggttgagccgctcgaagacgttcatgatctcgtcgctcgtttttgaatccaagttgcccgtcggctcgtcggccaaaatcagccggggcttgttgaggagcgcccgggcgatggcgacccgctgctgctcaccgccggagagctgattggtcttgtgggcttcccggcccttgaggcccacggccgccagcgacgcccgggcccgggccagccgttccttatgggagacattggcgtaaatcaggggcagctccacgttttccagggcggtcgtcctaggcagaaggttgaaggactggaaaacaaaaccgatcttgcggttgcggatgccggccagagcgtcgcggctcagggtggagatatcctccccgtccaggaaatagcggccgctggtcggcttgtcgaggcagccgataatgttcatcagggtcgatttacccgagcccgaggcccccatgatcgccacgaaatccccggtcgggataatgttgctcactccgcggagagcccggacctcggtttccccgacgatatacgtcttggtgatgttctccagccgaatgatgtctgcgttcatgatcgccggtgccttcgttctcagcggcggggcggtcccatcatcatcatgccgcccatcgcggaaccctgcgcctgggtcgaggccgcggcacctcccgtccccaggatcactttcatcccttcgcttaagtcgccgttcagcaaggccgcgtaggtattatccgtgatgccggtgcggacgggaacgggacggatttttccagattcctcgagaacccagacctggccgaagccgtcgcggctgcgggcggccgcgaattgcttgcgcatctcttcggtgaccggccccgtcgggcgcgggccggagccttcgggccggggcccggatccccgcagagcttcccgcttggccctcgcctcttcccacatttttttcatctcttcctcggacagggagggcgtgaatttcagggcggcccgcggaatcttgaccgttccccgggcttccccggtgatgatcgagacggtcgcggtcatccccggcttcagcttcaagtccggattgctggtcttgatgatcgtcgtgtacgtgacgacgttgttagtggtcgtcggcgaattgcggacctgctggatctcgccggtgaagacttcgccttggaaggcgtccaccgaaaaccggaccgcttggccttccttcacccggccgatgtcggcctcgtccacggggcattcaacctgcatcttggtcaggtcgctggccactttaaagaggatgggcgtttggaaaccggcggccaccgtctgaccgatgttgacgttccgggtgatgaccgttccatcgatgggagagcggatgatggcataggacaggtcgacccggctggaatcgagggctgatttctgctgggccaagctcgcctcagcgacctggagattcaccttggccgtgacataattggcctcgacggtctcccgctcctcgtgagagacgagctggcggtcgaacaaatcctgagtccgctcccattttttcctggcgttttcgaggttgaccttcgcctgttcaagggacgcctggcggctcaagtagctggcttcgttctgctggactttggccttcagaatctcctggtcgatttcggccacgacttggccggccgtgacgacggaattgaaatcggcgtgaagctggacgatcttgcccgaaacttggctcccgatttcgacgatgtcgacgggattgacggtaccagaggtgacgaccagggactcgatgtcgccccgggtcagggcttccgtccggtacgggagcgcattgttcttgcctttcttaataaaggaaatgccgataatcaggacggcgatagcggctagaatcaccgctcccgccagcactttctttttcatctttgttctccttcgagaagccgccgtccgggggccggcccgggccggacggccgggaaccggaatccttgctccgcgacttgcggaatttttccatcatggcgctttgcttggctttttgttccggggtcaggacggtatcaatttccttccggatctcggcccggatctctcccaaatgcttatagaaatcggaccgcagggcgtcgatccgcgcgtcatttttcttgaagatctcttccatccgggctttttgctccccggagaggccgaggtccttctcccactggtccggcgacgggccggggcggtgatgcccccggggaaagaaaaagacgcggtcgatgaacatgccggccgccgcgcccgcggcaaacgccagccccagtgaaagaacgattccccaacgcgtttgtttcatggccttcatctctttccggcgggctgttcatcggcggcgaacagcaccgtcaggtcgcgcacgtcccggcggccttcctcgatgatcgcccgggtttccgcgatcggatttccctcggtcaggagcagggcttccgagccggacaggtcggaggaccgcgaggaagggaacaagaacaaggtggcgaggacgaacccggcgatcaaggacagggaaatcgggatcgcctcggcccacaagcgggcccaagccgcgggcagggcggggcctgaggccgtcatccgggattcaagacgttcccagaagcggggaagcggctcgggaacagccgagccggaaagccgccggcggatctcggcgtgggcctcggcccgtttccggcaagccggacactccgccaggtgccgctccatcgaccggcggtccggcgcggaaagatcccggtcaaaggccgcgagaagacaacgctccacccggcggcagctcatggccttcctccttcggcttcaagatagggctccattttctttcgaagcattctccgggcgcggaaaaggcgggaatcgaccgttcccggggcgatcccgagaatccggccgacttcctcatagggaagcccctccacgtcccggagggtgagaatcgcccggaatttcggcggcagtgtttccatgacccggaaaacctctttccgccgttcttcctcctcgcgttcgcggagacggaggccggtttcttcgtcgacggaaaccgggccgtcgccgacatcgtcgagggaaacagtccggcgtcgcgaagctttccggaggtgatccttgacgtgattgaccgcgatccggtaaatccaggtgccgaatcccgattcgacgcggaacgacggcagcgattggtaggccttgaggaagatctcctgggccaggtcgtcggccgtggccctgtcccggacgaagccgtaggccagggcgaaaattttccggtcatacatgcgcaccagcttttcgaaggcgtccgtccgtccgttccgggacagctcgaccagcgtcttttcgtccatccgtgttcacgctcgtttgcctccgtcatccattagacgcgaaggcggggggaattcttccccgggggcatagaccggccgcatcctccgcccgcgtcttccttccccgtccgggaagacggcggcggcgcgcaaatccgccccattatagcaaaaacgggatccggcggacctattcatccggaaggcgcgatccgacgggaacgcccggcttcacgacgctttgcggacggctttccactcgaacaccggaggcgcgccttccccgccggcgaagccgcggcccccgctgaactccatcgtgcctttcaggctgccgtcggcggcgacggtccctttataggcaacggtcatttcccgtccctccggaccccgccgggtttccttccattcgatggtttctcccttaaacgtcccttcggacgtcatttccaccaggcggccgtcccggcccggccgtttgaccgtgacggtcaggcgttcgccctcctggacgaagacgacgatcgacacccgttcgcccctcggcgtcaccgtcgtcaactcccagctgccgccgaggtcgaacgccgccgacgccgccaggctcgagaacaaaacgacgcaaacaatgaaaacgttttttctcatggtttttcctcccctcttggacgccggcggggggtgtttcttcccggaacgggctttactctttcggcttccgcccggagacgggccgcagcgaagccgccgcccaacaggcgatggcccggccgcggccgatctcgccgagaccctcgttggtcttggccttcagcccaagccggtcccggggaaggccgaggagaggggccaggacgtctttcatcttttcaaagtaaggacccagcttcggcgactcggccacgacgacggcatcgacatggacgatccgaagccgcttccgccgcaggcgcgagacgacgtcccggagcaattccgtgcttcggacgtttttcaggccgggatcggtatcggggaacagccgcccgatatcgccctcgccgcccgctccgagcaaggcgtcgatcacggcatggatgatcacgtcgccgtccgaatgcccgagaaggccccgggagtgaggtatccggaggcctccgagatagagcggccggccggcggtcagccggtggaggtcatatcccaatccgattctcatgccggatcgcctccgccgcgatcaaatccaagggcgtcgtgatcttgatgttttccggatccccggaaacaacggccacttcttcccccagccgctcgacgagcgccgcctcgtcggtgcccgaaatcccctcggccgaggccgcggccagggcccgccggaggagagccgaggcgaagccctggggtgtttgaacgcgtcccaggcgtccgcggtcgagggtccggacgacgcggccgccgtcgatttccttcagggtatcccggcaagggaccgccggcacagccgctcctcgtttttccgcggcctcgatcacccggtcgatcaggccggccgagaccaggggacgggccccgtcgtggacgaggatgactcccgtccgccgctcatccagccgggaaacgccggccgcgactgaatcctggcggcgcgggccgccggccgcgacggcccggatcttgggaaagcgccggagatattccgcccccgcggccgtctccggcagaacaaggataatgtcctcgacgcggggatgggcctggaaggccgcgcagctccactcgaccaggggccggccgcccaggagggcgaactgcttgggcccgccgaaccgcgccccggacccggcggcgacgatcacggcggccgtcctcttcatttcgcctcgtcgttgtaccggccgaagatcattttgcccaccgtcgtttggaggacggaggtgaccatgatgtcgacgttgcggccgatcatccggcgggcgttgtcgacgacgaccatcgtcccgtcatccaggtacgccacgccctggtccttttcctttccttccttgatgagatagaccatcatggattcgccggggagcacgacgggcttgatggcgttggccatttcgttgatgttgaggacggccacgccgcgaagcctggcgaccttgttcaggttgacgtcgttggtcacgatcttgccctcgaggcggcaggccacctcgatcagcttcgtgtcgacttcgcggatttccggaaaatccatctcggtgatcatgacgttggccgtcttggatttttgcagatgatcgaggatgtccaggccgcggcggccccgctgccgcttgagcccgtccggggaatcagccaccatctgcagctccttgaggacgaactggggcacgaccagcgtcccctcgaggaaaccggcttcgcagatctcggcgatccggccgtcgatgatgacgcttgtgtccaggattttaaagatccggccgttgtttttttcacggaaaaagcggaacaaatacgacggatcgagccattccgatttccggatcccgatcaagaagccggccgccggcaaaagaaggagaaacatgacccggacgaaggcggccgtccccggatcggaggtcatggattggtaagccgccccgaggatccagcctaggatgacgccgaccagggttccgacgaccgagccccaaatgaccgtgaaggacgcccggcggacgcgcgactcgagaaacagggtcgccgcggccagaaacccggcgacggcggccgccggaatccggtcgagcccgaagggcggaacgaagtatccggccgcggcggtcacagcgacgaagaaaatccgaaaaagaaaaatgcccatgaccgcatcctctttcagtggaagatccctcgcaaggaggctctatcatatcagaaaacgaggtcgaccgcccgcctcagcgtcccggctcccagcagccggaccccgtcgattttctctttggccaggccggcgacgtttccctcgggcagaaggatcgtcccgaatcccagggccgcggcttcccggacccgggccgcggcctggccgaccgaccggatttccccgctgagcccgacctctccgaaaaccgccagcccggccggaacgggtcggttcatcaggcaggagacgattcccaggacgacgcccaagtcggccgccggctcgccgatctccattcccccggccgcgttcaaataaatatcctccgtcccgaacgtgtaacccagctttcgctcgatgacggccaggagcatcgacgtccggtagtggtcgagaccgaccgtcatccggcgcggattggaggcaaacagcgtcggcgaaacaagcgattggatctcgatgagcagggggcgcgtccccttgatggtcgcgaccaccacgctccccgactcgttcttcggcctttccctgaggaagaaagccgagggatcgggaatcgcttccaggccggccgccgtcatctcgaagatggccagctccgagaccggcccgaaccggtttttcagggcccggagcacccggtggctgtggtcgcgctccccctcgaacagaaggacgacatcgacgatgtgctccagcgatttgggcccggccagcgatccttccttggtgatgtggccgatgagaaaggcgggaacgccgttgcgcttggcgaatcggaacacctggttggcaacctcgcggacctggctgatcgttccggggctggaggacagcttggaggaaaagacggtctggacggaatcgaggacgaggacgccggggcgaagcttctcggcctgagccagaatccgctccaggttcgtttcggccaaaagaaaaagaggcccgccgccgacgcccaaacgctcgccccggagcttgatctggtccagcgattcctcgccggagacatagaggaccggcgttcgaccggccgcgaaatcccgggacatctgaagcagcagcgtcgacttgccgataccgggctcgcccccgatcaaaaccagggatcccaggaccaccccgccgcccaaaaccgcgtcgacttccttgatttcaacccgagcccggggcttggccaggttcttgacgtcctgatagggaatcggttcggccggagcgaaggcctgctcgaccagcggggcctcctcgacctccgcttcctcgaccatggtgttccactcgccgcaggccgggcaacggcccatccatttcggcgatttcgtcccgcacccttggcagacgaagacggatttgttcttcatcgaagagccagcccgaggccgaagaaaaactcccggcgcccggccagagtgaaatcatcggccccggcgaccaagtagagcgaccgcgtgggaaagatcttccccgtcaaccggaaccgcgggctttcctcccggttgaaattgaatccctcaaggctcaatccccaaagatcgccgccgagataatcgaggccgaagccgagctcgttctcgatgaatcccagccgcggggcgaaccgtcccagccggagccccccctggagggaaaagacaaaccgcccggcccagggatcccgaacgatccccgcctcgacaaacgagccgttcgccggccggatcccggccgcgaggcccgcccggacgagacggcttgttccataataccccgtctggaaatcagcgtatcccttaaccccggaaaggaggccggcggctttcctggccgaggagaggacctcggccgcttcgtcataaaggccgggctcctggatgatctttccggccgtgccctcgcccctctcgattttttccaggatcgcccggagcttggccgcggcctcgccgattttttccaagtcggccttgagtggttcgcggttctcggcgatcgtctcctggaggacggccaacgattttttcaagtcggccgagacgtcggccaccgtccggccgacgccgtcgaccgtctcgttggccccccggatcagccgctcgaattcggaccggttgacggtcagaatcgtttcgagctcggccgccgctcccgccgctccctccaaggcccgcttgaacttggcccggttctcctcgttaagcacgtcgctcaaggaggccgaaacggctttcaactcccggccgaccgaggagagcatctcaccgacctggtcgaatccgggtttctgggagccggcgatggaggcgttgtcagcgcaaaactccgccgattcgccgggatcgatctcgacgtatttctcgccaagcagcccgagcgtggagaaggcggccgtcgagtcgacgggaacccgcacgccgttgtcgatgttcatgacgacccgggcccggacgccggagagctggatgtcgcggacgaagccgatcttgaccccggccatcttgaccaccgccttggcgtccagaccggccgccgtcggcacgtcgacattgagggtgtatcccctctttttaaagacgtacccgatgtcgccgagcaacatgatgaaaacagccatgacggccagcgtccctccgacgaaaaggccgactcgcgtttttcggctcatgccttcctccattaaaaatccttgatcggtccctccgcccgcccctggaggaactgctggaccaccggatccggcgaatggcggatctcttcgggcggaccgacggcgatgatttttccgccgtataacatggcgatccggtcggcgactttgtaggcgctgaccatgtcgtgggtgataacgatcgaggtcacgcccatttccttctgcaggagaaggatcagatcgttgatcgcgtcggcccggatcggatccaggccggtggacggctcgtcgtacagaatgatctccggccggtaggcgatggcccgggcgagtccgacgcgcttgcgcatcccgccggaaagctcgtggggcatcaacttctcgattccccgcaggccgaccttggccaggctgtcggcgacgaggccggcgatctcctgttcgctcaggcgcatccggcgcctcaggccgaaggccacgttctcggcgacattcagcgaatcgaaaagggcggccgcctggaagagcatgccgaacttgcgggccgtcgcctggcgctcgtcccgtcccagggcggtcacttcgacatcgtcgacaaagactttcccccgctcgggggcgaggatgccgatcaggattttcagcaggacgctcttgcccgatccgctctggccgatgacggccagcgtttccccggtccggatttccaggtcgaggccggtcagcacccgcttcgggccgaaggatttgtggacgccgttgaatcggatcataggctggaaggaagaagctcgctcaggaagaagttgctgatgaggatgatgatcgaggcgatgaccaccgcccgggtcgtcgcccggccgacgccctcggccccgccctcggtttccaggccctgccagcagccgatgatggcgatcaggactccgaacacggccgccttgaccagccccgagccgacgtcccagaggtccaagtacgtgaccgtgttgcgccagtagacggtcttgttcacgcccatcaggacgacattgtagaattcggcgcaaaggatgccgatgaggtcgccgaacagggtcaggcagggaagcatcaggaaagcggccgccgtgcgcggagcgaccaggtagcggaccgagtccgcccccaaggtgaagagggcgtcgatctgctcggtgatccgcatcgttccgatctcggcggccatggaggagccgacccgtccggcgaccatcaggccgacgagaatgggaatgagctctcggacgagcccgacggcgatgatcggcccgccgtaggcctccgacccctggccgatgtacttgtgaaatccgtaatagctttgcagcccgaagacgaggccgccgaaggccgcggtcagggagacgacgggaagcgtccggaggccgatttcctccaattgctgaaggaagatcttcccctcccagggcttttgaaaaaagctccggaaggtccggccggccaggagggacagctcccccaactgctcgaagaaacggacgatgatcgaacgcggaggggcggccaatcctcactcctccgggccgcgatgggacgtttcgaggttttcgaacttggcgaacttgttctgaaaggccagttcgaactgccctgtcgggccgttccgctgcttggcaatgatcacttcgccgattccccggagctccgtttgaaccgccttttcttcaggtgtgaagtacatctccggacggtagatgaaaatgacgacgtcggcgtcctgctcgatcgcccccgactcgcgcaggtccgagagcatggggcgaggctcgcggcgggccttttccggggcccggctgagctgggagatgccgacgacggggatggccagctccttggccaattccttgagcgagcgggaaatgaacgacatttcctggttgcggttttcaaaacgccccccggcccgcatcagctggatgtagtcgatgaagacgatgtccagaaggccctccagcttcagccgccgggccttggccttcatctccgccagggtgagggcgggcgtctcgtcgagaaaaatcgggcaggggccgagcgtttccgcgctcaagcggagacggtccaggtcccggtcgctgatcaagccggaccggacatgctgcagatcgatcctcgcgtcggcgcagagcatccggatgaggagcgactcctgggacatctccatcgagaaaaagcccacggctttccccgcccgaaggccgatatactgagtcatgttcaggcagaaggcggtcttgcccatggaggggcgggcggcgacgatgatgagctcggacgggtgaaacccggccgtgagcttgttgagctcgtagaagcccgtgtccactccggtgaccgagtctcgggtcgccacgagcttctggacgtgctccatcgtcggtccgatcacctggctcaaggggacgaagccccggcggtcccgctgttcggccacgtcgatcatcgccgcctgggcggcgttgaccagatcgtcggcgtcctccttttcctcgtagctggcggcgatgatctgggcggaggaaaggatgagccgccggagcaggcttttttccttgatgatcctggcgtagtattcgacgttggagctgcggggcacgccgtccatcaaagaggacaggtaggccgcgccgcccacatcctccagccgcccctcccggcgaagctcctcgctgaccgccaaaagctccaccggcactccgcggtccacgagccggccgaccgtctccaggattttccgatgggcgtccttgtagaaatcctcgatggccacggtcgagagaacgaggctgtaattgcgggaattgatcaggatcccgcccaggaccgcccgttccgcctccgggctgtggggcggcgttcgtttcagaaacagcgaatccagatccaccgctcctcctttcgggccttccggcccgccggcggcctcaggcttccgccgggggagcctccgtttccgccggcggctcttcctcggcgacgacgtccacttggatctcggccttgtcgtcgtgatagaccttgatggtcaccttgtgggaacccaactgtttgatcggctcggggaggacgatccgcttcttatcgacggcgaagccctgcgcgtccaacgcctccttgatgtcggcggccgtgaccgagccgaagatgtgatccttctccgtggtcttgcgggtgaaggacagggtcacttggttgagcttctgaatcgtctcctggaaggaggcccgctcctgttcggcttttttcttcaaggccgccccttcgatttcgatcatcttgaggttggaagccgtcacttcgagggcgagcttgcgggggatgaggtaatttcggccgtagccggacgcgacgttgacgacgtctcccttccggcccaagttttccacgtcttgtttcaggatgactttcatgggacctccggtcttactcggtgacgtagggcagaagggccatgtgcctggcccgcttcaccgccgccgccagtttgcgctggtgaaaagcgcacgtgccggtcacccggcggggcgaaatccggccccggtcggggatgtactttttcaggatgtcggcgtttttataatcgatgaacttgacgttccgctggcagaaccggcagaacttctttttcggaggaaagaatttcctgtacgccggcttctccggccggtctgagcgttcgaaccgtttttcttcggccatgatcaagcctcctcgcgcttgggctcggcggccggggccgccgtctccgcgtccgccgcggacggggcgttcttccggacttttttcttcttccggacgttcatccgcgtttctttgaccagcgtcaggtggcggatgaccgtgtccatctggcggaaccgccggctgagctcgagcgggatctccgctccgccctcgtaatggaagaacacataatacgcctcgtgggccttcccgatgggataggccgtccggcgtttgccccacttttcgatccggatcatcttcccgtttttcaggggaacgacctcggccaggccctggacgacgccctcagcctcctcctcggtcatattcggggcgaggagaaaccccgtctcatactgcttcatccaaacctccttttggtttgacagcatccccctcttcggcggggggagcaaggaggaagttttcgcttcctcaacgaacgctaattatagctgttcatcgcttgatcgatccggccgtccaggacaagctccaaggcgtccatggcccggtcgaggcttccgtccaaaagcttcttttccgctttccggaacggctccaggacgaaatccgtgatgtcgacgttctcgggcacgggcccgatgccgacgcggatccgcgggaacgacgtcccaatcagcctggcgatcgaggccatcccccggtgggtgccggggccgccctcgcggcggacacggatctcgccaagcggcaggtcgacgtcgtcgaagacgaccaccaggcgctccgtcgggatctccatcccgacgaggagcgccttgacggcctggccgctctcgttcatatacgtctccggcagggccaggacgatccgttcgcccgcccgccgtccttcgcccgtcctggctgaaaacttgggttttctcaaacggatttcccaagccttggccgccttcttcaccaacatgtacccgatgttgtgacgcgtgtcggcataccgcaagcccggattccccaggcccacgaccgcccacacgctctatttctccggctcgggcttttcggcccgctccttcttgatgacttcgggctcggccggcgccgccgccgccgccgcttccacctcttcctcgaccgccggcgccgcttcggccttctcctcgtgcgggacctggaccaaggcgacgaccgcgcctggttccgtgatcagcttgacgccctcgggaaggacgacttcggagaccttgatcgactggtgaaggcggagtcccgagacatcgacgatcaggtgttcggggatcatcgccgggaggcactcgatcatcaaggcgcgggtcatgaagtcgatgaatccgccctcggccttgacgccgacggcttcgccgacgagctcgatcggaacctcgacccggatcgccttgttcatgtcgatctggatcaaatcggcgtgaatcacctcgtccgtcaagggattgatctggacgtccttgatcatgacgtcgcgctctccgtcttcgagcgtaatcttgaagagggtgttcagaccggtttcagacttgagaatccggatgatgtccttcttatccacgacaagggcctggctgggccggccttcgccgtaaagaacggctggaatccggccggtctgtcggatgcggtaggacgcgttcttgccgaacgcctcgcggggctgggtggggatcgtcaggttcatggaagtcgtcctccttaatcgaacagcgagctcacggagcttttttcattgatccggcggatagcctcgccgaagagctcagccacggacagcgtctcgatcttggcacaagcccgacgcttctccggagcgatggtattagacacgatgagcgtttcaatgggcgatgactcgattttgtccagggccttgccggaaaggacggcatgggtggagcaggccaaaacctcggccgccccggcgttcttcagggcctcggcgctcagacacagcgtcccggcggtatcgaccatgtcgtcgaaaaggacgcaggtttggccgacgacgtcgccgatgacgttgaaaacctgggcgacattgggggccgggcggcgcttgtcgatgatggccagcggggcgtccaggcgccgggcgaaatgcttggcccgcccgaccccgccggcgtcgggcgagacgatggtgatattcttcaggccgcggctttggacatgcttgaccatgaccgggaccacggtgaggttgtccacgggaacggagaagaatccctggatctggggagaatgcaggtccatggtcagaatccggtcggcccccgcggtctccaggagatcggcgaccaggcgggctgaaatcggaacgcggggccggtccttccaatcctggcgggcgtacccgtaatacggaatgaccgccgtgatccggtcggccgaggcccgcttgaaggcatcgatcatgataaagagctccatgaggttgaaattggcctcgttggagccgctctgaaggatgaagatatcctcgccccggacgttttcgtcgatgtagaaatggatttccccgtcggagaagcgatccaggacgcaagtgcccagatcgatccgcaggtaggcggcgatctcccgggccaagccgggattcgatgaaccggcgaacagcttcatggtcgtatccttttatgtcgcgcgcccggcgcgtttatttccggagctggggcgggaggattcgaacccccgaatcgcgggtccaaagcccgctgccttaccgcttggcgacgccccagacgtgattgcgtcccatccttgggcccggctcagcgtcgacgccgtcacggcgtcccaacggccggccaacgcggcccggcatctttcggcctcctcgcgtttctcgaaaaggccgaaaacacccgccccggaaccggtgacgagagataaaaccgcgccctgatcccgcaaaaagcgtttgatctcgttcaactgagggaagaagcgaaaaatcgtctcttcgagcgcattcgtcagggagccgagttcccgggtcccgagaaactgcgtaattttactggctttatcggcggaagtcaaggaggctggaggcaaggactcgtaaatcaggcgcgtcgacacggtcaagggaggaagaacgagaacgagccaacggaccggcagatcgggcaggggggtcagccggtctccccgctcctcccccaggcatagaccgccggtgaaaaaataggggacgtccattcccaacttccgccccaaggcttcgagatcggcgggttctagccccaactcccagagccggttgagtcccaggagaacagcggccgcgttcgagcttccgccgccgaatcctccgccggccggaaccctcttggccacgacaatttccgccccgcggcggcttccgccggcctcccgaaggagaacggccgccttgaaaacgagattggactcgtcccagggaattgaaggatcgtcccctcgaagccggatctccggcccgtcgagaggccgcaactccaagaggtcgaagaaatcaacccactgaaacagcgtccggatgtcatggtagccgtccgggcgctttcccagaatctccagcccgaggttgaccttggcgaacgaaggaatcctcaccggaagagcttctcgatttccggccaggtcacggaacggcaggtccggagaaaatccaaggagaaatccggttcggaccggtcaaaggccgcctccagcagggtgacggtcccttccgttccggcgtggcggaacgtccagcgccgcggcacgtcgcttcccccggaggagaattccaagacgcggaacgacagaccgccgcgctcgcccgagacgacccgtccccgggcatcacgaaccaatttccagccttcctgggacggttcgctccatcgcccggaaatcaatccggccatttccaaggggcggacgggaaatccgaggaatttctcgatgacctcatcccgcccccctcgccagtatatgcgctccgagggcagggcgagataggcgtcttcgccccggatcaggaaaatcgaaaccgcccggccgagggcgtcaaagatatccagccgggcccggtgcggaagaagaacggcgaaggcgaatttcgagcgggatgactcttccccgcgggtcaggcggagcgaggcgtatccctcaagctcccgcaagtcctcgcccggtcggaggagggggcgggaggggcgacaggccacggccgccaagccccagacgaccagcgcggttcccagaaggaaacgaaatccggaagggaaggaggcgggggccttcacgatttctcgtctatcttcaatccagcttgagcccgtagtcctcggccgaggcggcgttctttccggccccctccgaaacggacgggcgggaaggcgccccggcatccgcggccggcggggaatcgtcgagcttgaatccgtaatcctccgttttcaaggtccgcagcttcgcttggcgcagacgccgggcctcctcctccatcttcttcttccgataaagggggtagagcggcgacctgagctttctcccgaaacaggagaggcggggattggccgcaagcagaatgatgaagatgccgaaaatgacgaagatgccgatcatgccgatgttcattgccgcctctttccagccagcccccggtcccgatcgggccggccgggcgaaaaaaaggaacggcccgcgccgccggacgggcggaacgcccccgttcccgaagaatcagttcttctggaattcgggaattttgcgccgctctttatccttgcccaggttgaacccgaggaaaaacaccgagaaaagaacgacgatcccgaggaatgtcttaaaaaagccgttcataacaacataccttccgcagaaaagcttcggttctattttacccaaggggaacgaattgtcaaattttcccatccgctcgaactttgctataatgaacgggttaaatctcatcgcgaaggatgcgccgatgccgatttatgaatatgcctgcgagaaatgccggcagcggatcgaacggatccagaaggtttccgatcccccctgccaaaaatgccctcactgcggagggcctctccggaaactgatctcctctccagccattcagttcaagggatccggattctacatcaacgactacgctaaaaagggcgcctccccggccgagggaaagaaaaagaccgggcggaaggaaaaggccgaaaaagcggccgaatccgccgccaagccggtcgccggcgcggagtaagaggcggaaatcccggcccatgaaaatcgtcgtccggacgccgaattggctcggcgatgcgctgatggccttccccgccctgaccgccctgcgccggcattttccggacgatgagatttcgatcatcgccccggatggaatcggcgatctctattccggaccggaaacggaggcgcgctcgttccaccggggtccgtcggcccggggatccagcctccggcgggcggccgccgagttgaggaacgagcgattcgaggccgggcttcttttgacaaattccttcgcctcggccttggtgttcgccctcgcccggattcccgagcgctggggatacgcgcgcgacggccgcggccctcttttaacccggcgggtccggatccggaaaagcgacgagcccgtccacatggtccggtactacacggacctgatggaggggctgggaatcccggcccctcttcccgatatccgtctctccgtgacggaggaagaagccgcccgcgggcgggatcttcttgccgaggccggattggacccccgccgtcccctgatcgttctcagcccgggcgccgcctacggtccggccaagcgctgggcgccggaacgcttttcggccctggcccgaatcctccaggaacgtcatggagccgaaatcgccgtcaccggaaccgcggccgatcgttccgccgccgcgatcatatgcgccggcctcggccgcccggcggccgacctcacggggaaaacgaccctccgcgagctcctcggagtcatccaggcggccgccgtcttcgtcaccaacgactcggggcccatgcacctggccaatgccttccgggtccccgtcgtggccctcttcggccccaccgatccggccgtcaccgctccgtaccacgagccccggatcatcttgaaaaaggacgtcgtctgctggccctgtctctaccgcgcctgtccttatgaccaccgctgcctggcgggaatcccggccgaggaagcggctgaggcggccgggagttttttatgaaacggccggccgttttcctggatcgcgacggaacgatcgtcgatgacgccggctacgccagccgcttcgaccagatggcgattttcccgcaaagcttcgaggccgtgcggcgcttgaacgaagccgggctgacggtcgtcgtcgtcaccaaccaatccggaatcggccggggttatttaaccgaggacgagctggctgacatccattcccgcctggccggagccttcgccgccgccggcgcccgtctcgacgctttttattcctgcccccatttcgccgcctcccgggatccccggtacggccgcgactgccgctgccgcaaaccccttcccggccttgggctccaagccgcggccgatctatccttggacctggcccgttcttacatggtcggcgataaagcggacgacatccggttcgcccgggcgatcggagccacacccgttttagtcctgaccggctacgggcgcggggcccgcgatctgctggaaaaggggacggatcctctcccggccgtggccgccgacatcctggaggccgcgggctggattttgacccgggaaaaatccgtccggaaatgatccgcatcgacgatatcctggaaaaggtttccactcgcttcagcgagaaggaaatcgccctccttcaaaaagcaacggtcttttccgcccgggcccacaagggtcaggtccggcgttcgggcgagccttacctcagccaccccctcgaggtgaccgcccagttggccgacatgaacttggacgccaccgccctgaccgccggcctcctccacgacgttctcgaggacacggacgtcaccgcggaagagctccgggagacgttcggcaaggacatcgcctctctcgtggagggcgtgacgaaaatcagccgggtccaggaatcctcgccggaactccagcgggccgagacgattcggaaaatcatcctggccatgaccgacgacatgcgggtcatcttcatcaagctggcggaccgtctccacaatctccggacgttgaaattccttcccgaagcggcccagaagaggatcgccgcggaaacgatggagatctatgcgcccatcgccgaccggctggggatgggccggatcaaggccgagctggaagacctggcgttccgctatgtcgaacccgaggaatacttccggatggccgcgctgcttgagccccggcgtaaaaaatccgagcggaccctggccgagtttcaacggacgctgaagcggaaaatcgccgaaagccggattccggccgagatccagagccggatcaagcggccgtacagcgtctggcagaagatgaagacgcagaagatcgatttcggccaggtctatgattatctggcgctccggatcatcaccgactcggtccggaactgctaccagatcctcggcctcatccatcaaagctggccgcccatccccagccgcttccgcgatttcatcgccatgcccaagcccaacctgtaccaggctctccacacgaccatcctgaccgaagaccagagcagcttcgagatccaaatccggacggccgagatgcacgccctggccgaaaacgggatcgccgcccactggcgctataaggacaaggacgcccaggccctggtcaaggaagaccggcggctgcactggctgcgggaaatggtcgagctcttcaaggagcagcgcgacccgaaggaattcctcaagcagttgaaaatcaacctgatccccgaggaagtgtacgtctttacgcccaggggccgggtgatccccctgcccgccggagcctcggccctggatttcgctttccgcatccacacggaaatcggcctgcacgccgccggggcgaaaatcaacgggaaatcctcgcccctgcggacgcccctgagaacgggcgatatcgtcgagatcctcaccgcgcccgaccgggaaccctcccgcaattggctgtcgatggccttcacctcgggcgcccggcatcttattaagcgtcgtctcaaccagcgggatttccagcgggctgtagccctgggccgaaggctatgggaacgggaaaccgcccgctaccggctgccggccggatttcccgagggggacgacttgttggccgggctgaaggaggccgtttccgtgcccctccggtcgctcgaatatttctacgcccttctcggccgggggaagatcgtcctgaaccggaaaatcatggaccggatttggccgggccttcagccccggaggaaacgtccggccggcggccgggaggagatccaggtgcaggaccgcacccgggaattcgtccggctggccaagtgctgttccccgatccagggcgagcagatcatcggatatctcacgacgggaaaggggatcaccgtccatgccggccgctgccaccggatcgtcaatgaattgctgtcgccggaccgcctcatcgaggtctcctggggagacctcaagccggtcgtctacaaggccgggcttgtcgtctcggcggtcgaccggcccggagttctcgcccgggtgacggcggtcgtcgccggccaggaagcggatatcgtcaaagccgaagtggcgacttacgccgaccgaaacgcccagatccggatgaccctcaaggtcaggaacatcgggcacttggaggcgatccggacggagatcgcccgcgtcgacggcgttgtgtccgtggaccgcgcttgagccggtcagaccgctttttggacttttccggagcgcaggcagcgggtgcaggtccagatatacttgttccccccggcctccgtccgggccttgacccgctggaggttcggcttccactttttcgatgaagccttatgggaatggctgatggaatttccaaagacgggacctttaccgcaaatgtcgcatgttttcggcatgatgattctctcgaacttatttaaagggtgtcttttataacataaacgggccggggtttcaaccacgtgcatcggtttgtaaaagcaaagtgaaaatgtccggtttagccaagggccccaatccttgtgagataggcattaaggtgaagagggggctcgtggcggcgcgggggatgatcgggcggagggatgaaccggcctttgcatttgaaaacagcgggagggggctttgggggagatttttcagtcggcccttgcgtgatgtcccgaatcgcgggcggccggccccgcgcgtgtccttaaaaccgggccggagcggatgtcggacgggaccggggggccctccgctcaggcgagcttgcggcgaagcttgaaggcctccaaggtgttcttcatcagcatggcgatggtcaagggcccgacgcccttgggaaccggggtcagccagccggctttgtcgatgacccggggatcgacatcgccgaccaaagtgtagcccttatcggccaagtccttggcccggaggggatcgtcgccgaatagcgtccggaccgtttccgggtcggacaccgcgctggttccgacgtcgatgaccaaggctccgggcttgacgaactcgcgggtgacgaaagcggccttgcccatcgccgccacaagaatatcagcccgggcggccgtcccggccaggtcccgggtcttgctgtggcaaatcgtcaccgtggcattggcattggtcagaagggcggccaggggcttgccgacgatcaggctccgcccgatgatgaccgcgtcccggccctcgatcgccgcccccgtctccctgatcagctccaaaacgcccatcggcgtgcacggccggagccccggctggttttggagcagcaggccgaggcttgccgggtggatgccgtcgacgtccttgtccgggcggatccaaccgatcacctcgttggtccgcagctgcggcggcagggggagctggacgaggatgccgtcgacggcatcgtcgtcgttcaaggcccggatccggtcgtgaagcgcatccatggtcgtctcggccgggaggtgaatgacgctcccgttcaggccgagcgcttggcaggctttttccttggtccggacgtagctcagggaggacttgttgtccccgaccaggacggccgtcagccctggaaccgcgcccgtggcctcgcgaagccgccgggcctcgctcttgacgaattcccggacccggtcggccgggggttttccttcgagccacacgcccatttcttttctcctcgggaaaggatgggccgattataccggggcggctttccgcccgcaagacaaacggcaagaggcgctccccttgaaatccgttttggccggtgctatgatgaccgggcattcccgaccggaagtggggcgcgggcgtttccgtggttcccggaacggaagctttgacgatcaggcggcccgcgagcgcatcaatggaagaaaagaccaatccctggaacgagattctcttggtccttcaagacaaggtcgacgccaagagcttcgaaacatggttcgagcccacggcgttcatcggccaggacaaggacgatctctacgtcaaggtcccaaactcgtacttcaaggactggctcctgttccattactcaacgctcatcaacgagagcgcccagaacctgttcggccgcgtgttcgacatcaagtacatcttcgacgacgcctccctgacgttcaagcgggggatgcccgaggagcggcggaaccggtatggcgtccttctcaatcccaatctcaatccgaactactcattcgagagcttcgtcgtcgggtcgagtaatcaattcgcccacgcagccgccgtcgcggtcgccaagaacccggccaaggtttacaatcccctctatatctacggcggatccggcctcggaaaaactcacttgatgaacgccatcggccacgccgccctggccgccgatcccggcgttaagatcgtctacgtcaccacagaaaagttcatgaacgaggtcatcactcacctccaattcgggaaaattctcgattttcgtgaaaaataccgctcggtcgatatcctcttgatggacgatatccataatttggccggaaaggaccggaccaaggaggagtttttccacaccttcaatcacctgtatgacagccaaaaacagatcgtcatctcctccgattgctcgccccgggagatccaagggatggaggagcggtttcggtcccggttcgaatggggactgatcgccgacatcaaggtcccggatatcgaaacccggatcgccatccttaagaaaaaagccgagatcgagggcttggttcttcccgaaagcgtcgccctattcatcgccgacaaggtccaatccaatatccgagagcttgagggatatctccggcgggttgtggcgtatgcttccctcaagggggaatccattgatcttgacttggccaaggacgcgctgaaggatcttctggattcccaagcccggctcatcactgtggaaaagatccagaagatcatttgtcatgaatacaagatcaagccggccgagttgaaatccaaaaacaattccccggtcgttgcttttcctcgtcaagtggccatgtatctcgccaaggagctgacccccagctcgcttcccgaaatcggaaagaaattcggtggaaaacaccataccaccgtgatccacagcattaaaaaaatcgaaaagatgaggaaagacgacaaggaattcgacagggaaatcaacaggttgatccagtatatccaataggaatatcagggggttatcctggtgatgcacatttccattgcttttctttattttctttattaatcttatgaatagatcttaagaagaagaatgaagaatgttgataatcgatcgaaatctgggaaggtgaacccatgaaattcaacgtgacgaaggaaatcattctcgaagagctccaaatccttcaagggatcgttgaaaaaaggaatacgatgccgatcttggccaatattcttatgaacgtggccgagaccgaggtggaaatcaccggaacagacctggaagtggggatgaaaacccattttccggcggaagtggaggaaaccgggaccgtgaccgtctcgggaaaaaagctttttgaaatcgtcaaatccctgccggaagggcaaagcgtttcctttaaagagaaccacgatgatttgatgatgcaggtgacttccggcgagagcgaatttaaagtcctttgcctgccgaaggacgattatccccaagtggctgaggcgaaattcgaaaagaagatcaaattgccggtggaagatttccggggaatgatcgaccgggtctatttcgcgatcgcccaggagcaaagatactacttgaacggagccctgatggttatcaagccgaaaagcttggaacttgtcagcaccgatgggcacaggatgtcctatgtcctccgtaaaacggattctttggatatttcaaaggaaatacgggtcatcatcgccaagaaaacactcaatgaaatcaggaagttcggagacggcgagattgaattcgatatggatgaaaataatctcttcttccgttgtggaaggcggacgctgatcagccggatcatcgaaagcaagttcccgaattttgaagcggtcatccctaaggaaaacccgcatgtcatgacgctgaataaaaaaatgtttgaggaggcggtgaagcgggtttctttattctcggccgagcggtccaagggagtcaaactcaccctcgaaaagaatcgtttgcgcttgttttcctctaatccggagatcggcgaggccagggacaagatcgaagtcgaatacaaggggccaggacttgagatcgggttcaacgcgcaatatttcctcgattttctaggagccgttgaaacggataaaatccgtttcgagctcaaggatgagaacagcgcggccctgctccagccggacggagagacaggcctggaaagcaaatatgtcttgatgccgatgaagatataacggactcgccagggcagtaaaacgagatatccaccgttttaggcatcttttttcgataaaacaaatccttatttgaaatcatttctttttaatcacttaagttaataagatatatcgcataaaaatagggggctgtggatatcgtgttgaaaattatgaactttccggattcaggccgttgagaggggcccttttccggcggccctgggagggagtttaaagcgtttgctctaaaaacgccgccagcgcgtccacggcccggcggaccggatccgaaatcggggcgtggagggacgtggagacgggctcaatcccgagaaagagaacgcgcgccccgacgctttcctccaggtagcgaacaaggagggatagcgaaatacggtgagtggagatttcttcgtcggcgatggattccggatcgacggtgaaaatctctccggagggccggcctcctcgggccgcgtcgataagaaggaccaggtccggatgaaaatgccgcatctttccggtctcgttttccggggtttctccgccgtcgacaaacagaaccgggcggacaggagcggatccggcggacctcccggacagagccctccgcagcctctgaaggcagagaatcccggcggcatcgtcgccccggaggtcgtttccgatgccgcagacaacgactctcccggccgtatccatcgccgcggcgacggcggctttccaatcgagcggagagagttcgttcatggggaatcctccctggcatgataaggcatttcccggccttcgggcaacgccgggcggtcgtcgataaaaaaaaagccccgttccctgtggaacggggctctcaggatctcagcgcgagcgggggattacgcccctgatttgaccgcggtttccgccgccggcttgacgggcgcgggcgtggcgaccggcctcttcggcagggcgcggacgtattcccacgactttttaagatcatgacggtcgaaggcggcgatttcatgaagagtgtccatttccatcgccttgaccggagtggtcgggcaggaatccacgcactgggcgcagtggatgcaccggtcgttgtggatcgtcatccggaagcgcttttcggcctcgttgaccgaagtgatttcgatcgcttcggccggacagtcccgttcgcaggctttgcaaacgatgcagagctcggggtggaggaacggcgttccccggaaatccttcggcaccgcgatctttttgaagggatagtcgagggtggccggttttttgaaaagatgacggaaaagctccggcaggaaggcggcgatcttcataatgcaaaccctttaatcagaatgacgatcagaagctgaaggacggccagcggggcgagccacttccaggcgagggagacgacctggtcgacgcggattctccccgtcacggccctgaggaccgagaggagaaagacgacgaagagcgttttcaggacgaactggacgaaggccggcaggacgcttcccccgaagcctccgaggaagacggtcgccagcaggccggcggcgacgaccagctcgacgtcggccatcagccggaagaaggccagcttctttcccgaatactcggtgaaagtcccgccgacgatctccgtttcggcgtgggggatatcgaagggcgtccgttcgagcttagcttgaacggcgatcagggcgatcccgaagccgatgaggttgggcaggatcaggaggggatgagcccggtagaaggcggcgatctcggccatccgccaagacccggccagcacggccggggagaggacggccagaaagagcggcacttcgtaaccaaagagcatggtcaggacgcgcgtcccgccgatgatggaaaaagcgttggtcgaggaccagccggccagaaaaaggaccagggtcggcagactgagcaggtacagcaggacgatgaggtcgcccgggaaggagatcgggctggccgcggccaggtcgatgttccaaacgggcaggagaagaccggccgtgaggacgaccgccaggccgacgaccggcagggcggtgaagactttcttgtcggccttgtccgggacgatgtcttccttggccatcagcttgacgatgtcggcgatcggctggagaagaccggcgcgcccggtatgggtcggccccatccggttttggagccgggcgtagactttccggtcgaaccattcgacgaacgtggagtacacgaagaggaaaagaaaaccaggataaaccaagaggtagagaatcgttttcaaagcggccatgcgacgttcctttgcagtgacagtgaccgggcgcgatcgttcgccatccggcgcagatccgagaagcggagcgtgcgttcctctccggaccgggcgtcgaccagctccactgaccgttcagcgcagcagatgcacgggtcgatggccgcgaagatgagggggacgtcggcgatgaagccgtgcttgagaatctcgatcgtggccggatagttcgccagcgtcggggcccggaccttgaggcgctcgggtttgtccgagccgttggcgacgatgtagtggatgttttccccgcgaggggcctcgtagcggctgacgacttcgcccggcttggcccggcggggcgccttgaccgcgatcggcccgtccggaagcttccggaggatctgctcgcagatcttgtaggattcgaaaagctccttgatccggacgatcgtccggccgagcacgtcgcaggagtcggcggtggcgacgtcgaattcgacctcgttgtagaagtcgtgggggtcgtttttccggacgtcccggtcgatccccgaagcccgggccatggggccgaccgcgcaataatccatggcctgctgcttggtcagggggccgacgccggccaaacgggcgacaaaggttggttcggcggcgccgatcttgaagtagtattcgctccgggccttgagaacggcgaggccctcgaggattttcccgcggagggtttcgtcgatgtcccggcggacgccgcccaaggtgttgatggcgtaatggacgcggtttccggaaatcatctccagaaggtccatgacgacctcccggtcgcgccaggtgtacatgaagaaggtgtcgaagccggcttcgtggccggccacgccgagccaaagaagatggctgtggatccgctcgagctcggagacgagatagcgcaggtagacgccccgccggggcggctcgatttcgagaagtttctcggcgccctggacgaagcaggtggcgtgggaatgcgagcagatcccgcagatccgctcgcacaggtagatgttctggatccaggatttttcctcggccagcttctccacgccgcggtgattgtagccgagacggaggtcggcgtccttgatgacctcgccttcgaccgtcaggcggatggaaatcggttccttgagggccgggtgctggggaccgatggggatttggaatttcatttttcgcctccggggatgacctcggccggccgatcgaatttccaatccttgcgcagcgggaagttcccggcgggccagtcgtccggcatgagcatcggccggggatcgggcaggttatcgacggctatcccgaacatgtcctgcaactcgcgctcgtagaggaccgcgcccggaatcggaccgcaaatggacgggaggcgggggtcggccttggggatctgcgtccggaccgtgatcgagccggtcgtgtccccgaaatgataaagaatttcgtagctttcacccttgtccacgcccgaaatcgtgatgacgtaccagttgtccaactcggctttcatccgttcgaccagggtcacaaggccggaaggggcgacggtgacgaaaatccggtgggaagccgggtgggcgacggcctcgggggagacgaaggttttcagtttctcgattttttgttcgtcgttcatcggtgttctctcagagggtattcaggagcttgacgactccgtccaggatggcatcggggcggaccggacacccggggatgtagatattgaccggaatgacttggtccaggccgccgcagatattgtacgccccccggtaaacgcagccggacatggcacaggccccgacggcgatgacaaacttcgggtcgggggtctgatcatagatccgaatgatccggtcccgcagctggcgggtgaccgggccggtggcgacgatgacgtcggcgtggcggggcgtggctttcagaaggacgccgagccgttcgacatcgaagcggggcgtgagcgcggccacgacctcgatgtcgcaggcgttgcaggcgcccgagttgaggtgcaggatccacggcgatttcttccgggaccagcggatgacgcgttcgaacatgtcagctccttgtgatcaaggccagaatggagaggaagacgaccgccaggtaaaggacggcgaacaaggcgatttttccggccggaaccgtggcgatgaccagagcggccacgtgcatgatggtgaagaacagggcgacgaagaagaagagccggtagccgaactggactttcgtccccgggatgtcctcgccgcaggcgtaggaggtcagcttgccgccggtccgggtgagcttgggggccatccgtttgcccagcagatagatcaggacgaccacggccaggatgaggacgaaggccaccgggggggagaggaggatatcgattccgttcatgtcggattaacctttcagccgggtcagcgaccggatatcgagggtctgattcacgcggtacaggttgatgatgaccgccagggccgtggccaccaagctgacttcgatgacgatgtacgtcacgaccaggctctgggccaggaaaatgctctgtctggcccagcccgtcgagaggaggaccaggctcacgcccttgccgatgacttcgatcccgatgaaaagcttgatcaggttgcgcatcgtcagcaggcagtagaggccgagaaagaacagcacggcggcaaacaggaggtaaacgacccactcattaatgatcatggtgattccttttccggaagagggccaggacggcgaagacgccggccaggatgacggccaactggccgatcagatcgaacgagcgctccttccagagaacgtctccgaaagttcccgcctcggccgccccttccagggccgggacctgggccaggatcccccgcatgacaaagaagtcgatcaagagaaagacggcgaagaagagcggaaagacgactttcacggtcttggattcacggacgtccccgccctgtttggtcaaggcgatcgtcagcatgaagaggactgtgatcagcccggcgacgaccgagatctcgaataccccggcgtagggggctcccatgcggaaaaaaatgattcccaaaaagaggctggcgacggccagggcgacggcggacttgagaagatccttggccaggatggccgcggccgaggccagaaccagcgccgcgagaaggatgatttgaaaggtcatggcttaaaatcccttcgccagcgcgtccgcggccggctggacccaggaggagaaggcggcggcaaaccacaagcccaccccgatgaccaggagagctaggatcaccgtggccgccgtcatccaaaacggggcttccttcacctgcgcccagcgctcggccagcttgccgaagaaggctttgcgttgaaggatgaggtaataccagagggtgagcacgctggctaggaccgcgatcacggccagggaccattcccgcgcttggaccagggccatgataatgacgagcttggaccaaaagccccccagcgggggaacgccggcgatcgagagcgagccgacgaggttggtcccggccgtccagggcatccgtttggccagcccgcccatctcgtccaggttccgcgtcccggtcgcctgttgaaccgagccgctggtgaagaacaggaggctcttggcgatggcgtggttgaagagatggaagaggccgccggccacgccgagaggcgttcccagcccgaggccgagaacgacgtatccgacctggctgatggaggaataagccagcatccgcttcatgtccttttgaccgagagccaggaaggcggcgacgacgaccgaaacggccgccagccacatcagcacctgggacagggcgggggtcaggccgatgacgtgaaagaagatccgggtgatggcgtaaacgcccgagactttgatcagcaggcccgaaagaatggccgaaatgggggccggggccgaagggtgggcgtcgggaagccaggcatggaaggggatcagggccgccttcagcccgaagcccatgagaaacagggcggcggcgacgccgacgacggccttggcctccaattgccggagaccctcggccacggcgtcgaagcccagggctccggtcatgccgtagaggacggtgaccgccaacaagacggccgccgaggccacgaccgagagcatgaggtatttgaatgaggcttcgagctcctcggcttccaggccgtaggcgaccagggcgtaggaggccacggccgcgacttcgaggaacagatagacgctgaaaagatcctgggaaagaacgaggccgttcattcccgcgaccatcaccagcagaagggcgtagtaattggccttggcgccgtaatgctccatgtaattgatggaatagaggccgacgcacaggctgaccagttggatcgccatcagcatgaacaggctgaagccgtccagggcgatccggatgttgacggcctctccgaaccaccgcacctgctggacgatcggcccgtggaccaggagcgtcttggctccggtcacggcataggccagaaggcccgccaggacggcgttggagaggatgtcgggcagaacccgccgggacgctttgccggcgagaggcaggacggcggccaccgccaggggcaaaccgatgtagatgaaaatcaaaagtcctcctctctcgttacttcaaaatgacgttgatcagggcgatcaggacgaccagcccgcccaggccccaagccaagtagttggcatagtgaccgttgtgggcctttcgcagcaggccggtgaacgccgttccgactgcggtgacgcccttttcgtagacggcgtcgatcggccggtcgatgcccttgaacaagatccaggacaagccgcgcaggaatttgatcccctgttcgtaaagatcgaagaaccgcttctcagcgccgtcgtacatctgcttgaagaacggagcgtgatgaatgggctcggaagccagccaggcctttttcccgccgcgcttgaacccgtagacgtgaagaccgaaggccaggatcaggcaggctaccgagatgccggcgatgacgttgaaaagatccaaggcatgggcggtgtaatcgatcggcgcgcccgcctcggcgtgggcggcgacgacgggctggatgaattgcgtcaggggcagcttgttgaacaagccgaaggtgatgcacaaaagggcgagaatcaggatcgggatcagcatggtgaccgggctttccttgacccggccgggagaccgctcctcggaccgcttcccgaagaagaccgcgtgtccggccttgaggaacgaggcgaaggtgaagacggccccgacccaggcggcgatcgcgaagaggatcgagccggactccacggcgccgtggaagaccatttccttcgagacgaagccgttgagcggccagacgcccgaaatcgccagggcgcagaccgtgaacccggcggccgtgatcggcatttcccgggccaggccgcccagcttccgaagatccgtcgtcccggcccggtgttcgaccgagccggcgctgaggaagagcccgctcttgtacatggcgtggttgatcatgtgaaaaatcccgccggcgatgccgatcgggatggccgtgccgatgcccaggatcatgtatccgacctggctgacggcgtggtaggataacagccgcttcaggtccttctggaccagggccatcatgacggccagaacgatcgtcgcggccccgataatcatcaggaggagagagaggcctgagccgggctgaagcgtgaagatatccaggcagatccgggcgagcaggtaaatgcccagaagcttctcaaaggcggccggcatgtaggccatgaacgtcaccggcgcgtcgatcgcggcgtccgggatccaggtgtggaagggcatcgctcccgccttgccgatcgccccgatcatcatcaggatgaaggcgagggcggccggtccctcgggcttgagcgagacctgggaaatggtcgtcgtcccggcgagcgaccaaacgatcccgatgccgaggatcatggcgaaatcgcagaatccgttgatcaggaacgccttggtcgccgttcgatgggcttccttgccccccagcgagatcagggcgtacagcgtgaccaggagcccttcccagaagaagaccagggggacgaagttgtcggccaggaccgccccaaaggccagggcggccgagaagaagacgtatgcgtagtactcgcggacgcgcggatggtccttcatcttggccgctgagtaaagggcgatcaggaagagaaaacccgagaggccgaggagaatgaaggccgggaactggtagagccggagctccatcgggatcccggagcccaaccacggagctttccaggccagattcttgacggcgaaaagggcgaatccgagatagagggaaacgccggcggaaacgaccgccaaaacctcgcggacgtatttgaccgtccgggggatcaagaaaaaggcgacgcccgtaagggccggcagaagaatggtccagagaagagttgtaggcgtcatttgagccaccccatgagatgagccgtggccgtttcggccaggaccgaaggataggcgatcagcaggcccgcgaccagagagaggacggccaggatcgagacgacggcgaccatggaccgcgtcccttcatgggccggagctttggcttctcccagaaagacctggctgaaaacgcgcaggaggtaaaacatggtcaaaacagcggtgaacagggccacggcggcgacgccgactcggcccgccttgaccgtccccatgatcaccaggaatttagaaaagaagccgccgaagggcgggatgccgatgaccgagaaggcgcagaagaggaaggagagggccgtcaggggcatcgatttgaacagcccgcccatctcgcggatgtcccgcttgtgggtggcgtggatgacgatcccggcgcagaggaacagccccgccttggccaagccgtgcatcaggatgaacagcgtcgatcccgtgaccccggcgtccgtcaggacggcgtagccgagaaagatgtagccgatctggctgaccgtcgaataggccagaatccgcttgaaatcgttttcgacggtcgccgcggcggccgcgaccaggctggaaacgaccgcgatccaggggagcgcgtcagcccagccctccggaacccggaagccgtagacgaacaaccgggcgaaggcgtagacgccgattttgacgaggacggccgcgtgcagcagagccgtgaccgtcgtcggggcgacgccggcgtccggaagccaggtgtgcaggggaaccgtggccgatttcgagaacattccgaaaaggatcagaagaacggcggttccggaaacgggcagccccctcatcaccgtgaggtcgaagctgccggtttgaccgtagatcaagatgaacccgagcagcatgaccaccgcgccgaagaaggtgatcaggaaggccttgtcggccttcttcacgtgctccttcaggcggtagaagccgatgagtcgccagcagcagatggcgatgatctcccagaacaagtagaggaagatcaggtttcccgaaaacaccagccccatcatgctgccgatgaacaggacgaccaggaggtaatactcgttctggttctcctcgtcccggacgtacccgatcgaataaacgatgatcaggaatccgacgaatgaagagacgcaggccatgaagatcgacaaggggtcgatcaacaggatgaagtccagccccagaacgagattcttccggacgaccgtttctcctccggccagggcccggggcaacagggacatcgccaggacggaggtcgcggcgccgagcgccgcggcccaaaccgaccgggcggcccgggaaatcaggcccgccagggggatcgtcatcgagccgatgataggaacgaggaccgtgagtagggtaatggtttcttggctcatgggtggaccggaaagtatactcatcggatccgggctcgtcaaggattttcaacggtttgtccaggggttttccacagggttttacacttccgcccggcccgccgccggcgccttcgcccccggaggaaaacgctttcgtaagattccgtttgcttttttttcgggaaaaatgttgaatgagggcggaagcgcggacgagaggaggagacgatgagcctaatcatccgaaacgtcgagacgaagaaagatctcaagacgttcatccatctcccggaaaaaattcatgccggccggcccgggtggacgccccctctctatatggatgagtggacgtacttcaatccgaagaaaaaccgggcgtttgcgttctgcgacacgattctcctgctggcttggaaggacggaaagcccgtcggccggatcatgggcatcatcaaccgccgattcaacgagcaccggaaggaaaacatcgcccgcttcgccaacctggaaacgtatgaggaccgggatgtctttcgagcccttgtcggccgggttgaggaatgggcccgggagaaggggatggcccggattatcggcccctacggcttttccgaccaggatcccgagggctggatgatcgagggctttgagaaccacgccacgatcgcgacctattacaattacgaatggatgccgcggtggatcgaggaggacggctacggaaaggacgtcgattattatgtctaccggctggcgattcccgaggttcttcccgaattttataaaaagatctttgaacggatccagcgccgcggccagtatgagatggtcgaattcagatcccggaaagagatcaagccgtccgtccgaccgatcctctctctgatgaacgactgctatgtcaattcgaatatctacgggtaccatcccctggacgagaaggagatggacgaactggcgaaaaaatatctgcccgtcttggatccgcggtttgttaaagccgtcaagaaagggccggatttcgtggcgttcatcgtcggcatccccgacatgaccgcgggcatccgaaaagcccggggccggctgttccccttcggcttgttcaaaatcctccgggcggccaagaaaaccaagcagctggacctccttctgggagggatccgggaagactgccagggattcgggttggacgttttcatgggcacgcggatgatcgcctcggcccgggaagcgggttttgagtgcctcgacacccatcacgagctcgagtccaacgtcaaggtccgggcggaaatggaaaagatgggcggcgtgctttataagaagttccgcgtcttcacgaaaaatctctgagccggcctattcagggaaaaaaatccggaccaccgtccctccctcgttccggacatcgattttcccgtccagctgagaggccaggttctggacgaggcgaaggccgagggagtcgggcgatccgtttttgacggcctccgggatcccgacaccgttgtcgacgaccgtcagctcgattcccttctcccgggaggaatcctcctccgcgtccagtccgacgcggctcaaggtgattttgacgacgcctttccgctcggagggaaaggcgtgcttgagagcattggaaaccagctcattgacgatcaagccgtaggtgatcgcggtttccaggggcagagagatcctctcggcccggatgtccgcggctacgggagctttccggacgtcgtagatttccagaaggtgatagaccagtttccggaaatactcgtccatgtcgatcagcgtcagctggtccgaacggtacaggctttcgtgaacgagggccatcgcccgaacccggctgatggtccccttgaacacgctcatcaacccggggtcggagatacggcgggactggagaaacagaaggctcgagatgatctggagattgttcttgacccggtgatggacctctttgaggaggacttccttctcccgcagagaagcctggatttgagccgtccggtccaaaaccagggcctccaggcgttcggcctgccgatgctgggtgacggccaagccaatggtgagtatcaatccgccggcgagtaaaaaggacgccagcaggaaccaccattgcagccagaacggattccggatgcggatgacgggggaggagactgcttcgctccgggttcccagggcgttcttggcccggagatggaaaacataggatcccgccggaagattcgtgtagcggatccgccggtcggcggccgcgtattcggctccccatgttttatcaaacccggccaagtagctttcgaaccggagggcgccctcgttgatgaaggaggtcccttggaaatggaacatgaggttgttttcccggtatccgaggacgatttccgcggataaatcggccggcgtcccgttgacgtccaggccggtgatggagactgtcggcggggggacgtcgtccggccccaggtcgaaattctctcggtagcatgaggcccctgtgttcgtcccgatccagatccggcccaggcggtcgatcatcccggccgaccggttgacttcccgtccggcgagcccctcggctttcgtgaaatcgcggcgtgtccggccgtcccaccggacgacgccgttgtccgttccgaaccaaaggcggccggcccggtcttcgaggatgagatacacggggcggcggatctcgaatccgttttccgagaaaaggtccaaccggtcgccggcgagcaggcgcaggccggccagcgttccgaccagggttcgcccgttggaatcaagatagaccgaaaagacgttggacacgccggaagcctcatctcccgaggaccgcgtccaggagcttccgtcccagcggaagaggccgtgtttcgtcgtcgcgacgaagagcagccctccccgggcggcgacgatcttccggatgtagcagcccttgaacattcccgggaagacctcgaccgggcggcctttgcgaagttggaacagggcgtcgctttgggcgatccaaagccgccggttttcatcgaagacgacggaggtgacggggtgagtcgggttcccggggacgtcacgccaacggatgcggtcgtttccttccaagcttcccaagccgaggcttgcggccgccaaccagaggccgccccgatcgtctccggctaaatcgaggacgcggatctggcccggaggagcgtccggtttcgctttaagggcgatctttctcaattcccgcccgtcccaaatggtcaggccgaagttatggccgaaggcgaccaccccgtcgccgaaggcctgaatggccgtcacttcgtcttccagcaagccctgggcgctccggtaattatggaagcggcggctggagatccggctcacgccccggaagccgccgatccagacgttgctttcgcggtcgagaaaaagagccgccgcgccttcggcgatgaggccgtttcggactcccagagggtaggcgctggcgctggacggatcataatagaagatggagaccggatttccgaaaaagagcccgccctttccgtcgggtaaaaccttcgctgccgggaaattcgaggaaaacagcagcggattctcccgtctgaggatgcggagccgcccgtcttgaaagatccccagccagcgcgaacccaggagccagatgacgtcgcctccggaggcggcctcaacggccgctcctctgatgtccccggctaaaagaggatcgaccccggcccaccggttctcgatggaattttccccggcccaggacaatcccttttccgtcgcgacgagaaaaccgccctgatacgggatgatgttgcggacttcgctcccggccaggcctccggttttcgttatcgtcctccagcggatcccgtcgaagacgaaaatccccgaaccggaggttcccacggcgacgcggacttcccggccctccggacggacggccaaagcggtgcaatacgagacggcggcggaggggggaaagggaaacgaagcccaactccggccgtcgaagcacatcaggatccaggcgggattggatcccaccgcccagatccggccttcggtgtctacccggatgcagcggacgtcctgggcgggcaatccggttccagacgtgtgcgatgtccaggccgctccgtcatagaccgaaatcccgccgctcgtggcgaaccacatccggccggaggcgtcctgggccaggtcgtagacggtcgaattgactaaaccgtcgttttcttcataggtgcgcgtgaaaaagctctgagccgccgaccccggagccagaaaaacaagggcgaggaccacccgcaaccctttgcagagcttcatcatgaaattccgcttccattctaacaaacgataccgcgaccggcaaacggggggagatgccggggagactcagagcccgagggagacgcggacggccgcgatcaggtcggcctccttgaacggcttggcgagactgaggccgaggcgggcttcccggatccggcgcagcacggcctcgtcgtccgtggccgagagaaaaatcaccgggatgctcttttcggcttggatccgcccggccgtttccaggccgtcgagcgggcctttcaaggtgatgtccatcaagacgaggtcaggatttttttcccgggcgagggtgatggccttctccccggacgaggcgaggccgcagacggcgaagccggcgctttccaatcggacctggatttccatggcgatgatgatctcatcctcgacgatgaggatgagggggcggccggcggcttcggtcatgtcataggattccgagaaggagccccaggtagatcatcgtcaaggcgacgaggatcacgatcgtgctccaggctatgatattgtatccttttttgttgacatattcacccatgagctttttgtcgttggtcagaatgagcatgaaaacaaggatgaggggaagggcggcgccgttgacgacctgggaaatatacatgaccgggaaaagggggattccggggatcaggacgatggccgcacccaagacgatcagcatcgagtaaagtccgtaaaattgcggagcttgggaaaattttttatccacgccgttttcccagcccatggcttcgcaaacaacgaaggcggtggacaaggggaggatcgaggcggcgaacagcgacgcgttcaacaagccgaaagcgaagagaaaggcggtgtatttcccggcgagcggccggagcgcttgggcggcgtcggcggccgtctcgacgcggacccccgccgggaacagggtcgccgcgcaagtcaggacgatgaacgccgcgatcagcgtcacgatgacgctgccgatgatgacgtcccagcgggcgaaccggtaattcttcaaagcgatgtttttttcaacgatcgacgcttggagatagaactgcatccagggcgcgatcgtcgtcccgatcagtccgatgatcatccccatccccacggaggaaaaatcgaagtgcggccggacaaaacttctcccgatcgcggcccaatcgggcttggccaggaagccggccaggatataggtgaggtaaaaaagacaggcggagagaaagaccttttcgatggagcggtacgtgcccttgatgacaagaagccagacggccgcggccgccagggggacggagaggtatttcgagacccggaaaatctccaggctcgaggccacgccggcgaactcggcgatgatattgccgatgttcgtgaggacgacggcgaaaaggaggtaaacggtgatcttgaccccgaaccgctcgcggatcaggtcggacaacccctttcccgtgacgacgcccatccgggcgctcatctcctggacgatcatcaaggccagcatgatcgggacgagcgaccacaggagggaatatccgaaatgggctccggccatggaataggtcgcgatcccgccggcgtcgttgtccacattggacgtgatgatccccgggccggcgatggacaagaacaggagaatcgatttccagcggaggcggagttgtctcatcggagggacgaactcgcgttcacccggccagccgctcttccatgatgtccgtcagagtgatcaatccttccatcctcccatccttgttgaccacaggaacggccaaaaacttgtatttcttgaaaatgtccgcgacatcccccacgtcgtcctgcggatcgatggtcaccaagcgctcgttcatgaacctcccgatcggagcgttcggctcgccgatgatgagatggcggagggtggcgactccgcgcagccggccgtcgccggaggtgacgtagatataggcgaccgactcgagggggtaggtcgtcgcccggaattcctcgatcgcctggccgatcggggtatcctccgagacggagaaaaagtccttggtcatgatgccgccggccgttccctccttgaattgaagaagggccgtgagggcctcggccgacggcttctccatcgaccggacgagccggtccttctgatccgcgggaagtccggccaagagatcggtggcttcgtcgggggccatttcctccaggatgtccgaggcccgttcgactggggaggattcgatgagagagatctggagcttcggatcctccacttcctccagggcttgagcggcggtttgaagatccagggagcggaagagggaggaccggttggtccggtccagctcctccagaatgtcggccaggtcggaggggtggatcgtccgaagccatcgggcggcgacgttcagcttcagcttcttcttgtcgggatcggccatcagaggctggacatatttccaggaaatgatcttttcctcggcgcggtagtcgaagagccaaagattgatcttatccgtcaggcggagccagccgaggcggcggagaagcccccgccaaccgaaatccacgtgggcgacccggagatcccggttgacgctcaggagatggatgtcattgacccgttcgatcttggccccggaggtgtcgacgacttgcttatccaaaagttcttcgcgcagccaaatttcatcagacgccgtcgccggagaaggaaatgtcttttcggcttccccggacagacggatcgccgccgcatcgagccgttcgacggccgcccattccacttcgcccagcttggggaagcggcgtttccggacggctaagccgacgatcggggggtacggctcgttcaggcggatcttgaggtcgtgaagcttcccgattgttccgccggcggccgagacgaccggccggttcaggatttccgagatgtaaaaaaaacgtccggccggaccggccttcccgggcgtttccgtttgtctgcggctcatgcggacctgttcctccctggaacgaggcgttctcgcggacggaggattatttcgcctcggcccagctggccccccagccgagcgaaaccttcaagggcacgcggaagccggggcaggccgactccatgacgtttcggaccaggccgtccaggatggaacgttctttttccggcgcttcgaagacgagctcgtcgtgaacctggagaatcatccgggcggcgagcgctcgccgcccgagttccgcgcccgccgcgatcatggctttcttcatgatatcggccgccgttccctgaatgggcatgttaagggcgatccgccgcccggcatcccgggccgcccggtccgactgcttgagctcgggaaccggacgccgccggccgaacagcgtttcggcgtatccccgggaggcggccgaggcgacgagtccttcgagataggctttgaccccgggaaaccgttcgtagtacttgtcgatgtattcttgggcttcccgggtcgacgtttcaagctcccgggccagggaaaaggccgaggcgccgtagatcaggctgaaattgatgattttcgcccggcgtcgccgttcctcatccgtcccgccggcgtttcggccgaagacccggtcggccgtctcggcatgaatgtcccggtccctgcggaaaatgtcaatgagggcgggatcctcggagagatgggccagcacccggagctcgatctgggaataatccgcggccagaagaaggcggcctttttcaggaatgaaagccgcgcggaagcgcttgccgatcggtccgcgggccgggatgttttgcagattcgggtcggagctggagagacggccggtcgaggtcacggcctggttgtaggaggtgtgaatgcggccgtcggccggatcgatcaaggcgggcagggcgtcggcgtaggtggacttgagcttggccgtctggcggtattcgatgacgagggggacgacggggtggagatcgcggagaccgtcgaggacgtcgatggcggtcgagacggcgcccgatccgcgggcttttttcggggccgggagaagaagcttctgaaagagaacggacgacagctgggcgggggaattgatgttgaactcgagcccggcgtgctcgtagatctgtttttcaaggaggcggaggctggcttcgagctcggccgaaacgctgcggagggccgcctcgtcgacccggacgccggccgtttccatgtccgccaggatccggatcaacggacgctcgaggtcgcggtagacgccgtcgagtccctcctgttccaagcgcggccggaggatccgggcgatggacagggcgaagtcggcgtcctggcaggcatacggggcggccgattcgaccggcgcgcggttcatcgtgatctcgttcttgcccttgccgacgacggcttggtagggaatggccgtctcctggagataagccgcggccagacggtcgaggttgtggcggccccaattcggttccagaagatacgacaggatcatggtgtcgtcgtccaagccctggaggtcgaggccttcccggcggagaacgatcaggtcgtacttgatgttctggccgatttttcggatcttcggatcctccaggaccggtcggaggatgtcgagggcttggccgaggggaatctgagccggggctccgaggtaatcatgccgcaggggaagataaaaggcctcgctcggctcaagggagaaggacatcccgacaagccgggcccgggtcggggagatatggtcggtttcggtgtcgagggctacgaaacccgcctcgcggatccggccggtcaggcgcctgaggtccaaaacggcgagaatcgtccggtaaacgcgggtttttttcctctcgagcggggcgccggcggagatcccggcggccaggctcgtaaattccagctcggaatacagccgggccagggccggcttgtccggctcctcgacctgaaaggcgaccggatcgaaggggacgtccaaggcgcattcgatcgtggccagcttccggctgatttcgatcttgtcccggttgtttttcaccgcttcccggagccgtaaattcttgatccgctcgggatgttcgaggagcgcgtccaggcttccgtgctcggtgatcagggccttggctgttttttcgccgattccgggaactccgggaatgttgtcggacggatccccccagagggaaaggacgtcgaccacgcggttggggggaacgccgaactccttgcccacggtcttttcgtcgaaaaatttctccttggccgggttgaaaaccttgatcttggagtcaaccaactggaaaaggtctttgtccgtcgtgacgatcacggtttcaaatcccgccgcggccgcctggagcgccaggcagccgagaacgtcgtcggcctcgtggcgggggctctccaacagggggatccggcaggcttgaagaacttctttcagcttaggaagctgggcggccaggtcgtcgggcatgggctttcggtgggctttgtaatcctggtaaacttcccggcggattttttccccgggagcgtcgaaaacgacgccgagatgaccgggggcggcctcgtctaaaatcttgcgcagggtgatcagaaaaccgtagatcgcgttcgtcgggaatccggcggccgtcgagagccgctgaacggcgtaataagatcggtagagcagggaattcccgtcgatgagatagaggatttttccgggcatcgtcaggatttgagcagaggaatgtcgagccgtcccccggcgatgtcatcgagaacggcctgatgctgatcacggatgagatgcgtcaagcgttcggcccgctcgggatcgtcaaggagcgccgtgcaggaggacttgcgcgaatagacgagctggccgcgccggtaaatcagcgtttccagggaatgggtttgcggtccgccctcctgggtttggaccaggaaggaaatcccggaataaagaatggtcgtcgataggccgttcatcggatgtcttataaataatccgattggagagattaatcaagaagaaaatacgccggaacccggcggcggccggggcggcccggccgccgccggcgccggggacgctccggccctcgggccgccggccggcggttggttgacaaagggaagtcacatggtataataagcggaccttttgcgggtgtaacctatgattattgatatagataagttgccgaaagacggactggacatcagccggaatttcgattttccgagcgtggacctggtcgaggaagacgccgtcttcctccaacccgttcaagccgagctctcggtcaagcggatggaagaggaggtctttatcaagggccgcgtgaagaccgtcctgcgcttcacctgcggacggtgcctcgcgccttttgagtttcccgtcgattcccgcttcgacttggtttttctccccgaggagatgcaggagctgaaggaagaattcgacgacgaggatgccgaccggctgttctaccggagccggcggatcgacctccgggaggtgatcctcgaacaattgaacctgacgtttccggcccggccgttgtgctctcccggctgcgagggcttgtgcgccgtgtgcggcaaaatccggcgcgagggagcctgcggctgccaggtcaaggaaacggatgtccgtctcgagccgctaaaaattcttaggaaagataagggaaaataaatgccgaatcccaaacgcagacactcgcatgcccgcaagggccgccgccgggcgcatgatttcatgaccgtgccgtcgttctcctcttgtcccaattgcggaacgccgaagatgccgcatcatgcttgtccggaatgcggttattaccgcggtcgaccggtgatcaaagccgccgaaaaataattctggattctcgtcggatgaaaatcgccgttgacgcgatggggggggatttaggtctccggatcacgatcccgggggcggtccaggccgccaaggaaaatgacctggacgtcgttttcgtcggagcgaaggaacagatcagcccggaagtcgcccgctgggggggaaaaccttcggatttccccatcatcgacgcccccgagtccgtcggcatgggagacggcatgttcgccctccggcggaaaaagcgctcctccatccggatcggaatccagcttgtccgggacggacaggccgacgccttcgtttcgatgggcaacacggccgccgtcgtcgccatggcccgccaaattctcggccccctgccgggagtcaacaaaccggcgctctcccttttaatccccaccctgaaaggacacacccttctcctcgacgtcggggccaacgccaattgccagaccgaggacctcgcccagtttgcggtcatgggcaaggttttcatggagcaggtgatgggccgcccgaatccctcggtcgccctgatgagcatcggggaagaagagggcaagggcaacgagctgacccggcagaccttcgaccgtctttcggtctccggcctgaacttcatcggcaatatcgagggcaaggacctgtacgcgggaaaagccgacgtgatcgtcagcgacggattcaccggcaacgtcgccttgaaggtcagcgagggcgtcattgagacgcttttccacatggcccggcgcgaaatcacgaagaatttgttcgccaagatcggcctgctgctcatgaaaggccatctcaagcggatttataaaagagtggattacagcgaatacggaggagcccagcttctgggcctgaatgggatgtgcatcgtcggccacggccggagcaattccaacgccgttaaaaacgccgtccggctggcccgggaattcgtcgtcaagcgggttcaggacagaatccgggaggaactcgcccggacggtcgccccaggggaggttaaagcctgatgattttcaaagacaaggtcacggtcgtcacgggagcttcgcagggaatcggcgagacgatcgcccgggacttcgccgccgagggcgccgtcgtcgtcctcgtcgacatccaaaaggaaaagctggaggccgtcgccgcttccatcaaggccgccggcggccgggcgtccgtccgggaagccaacgtcgccgcgttcgcccaagccgaggcggccgccgcctcggtcgttcaggagttcggaaaaatcgaccatctgatcaataacgccggcatcacccgcgacaaccttcttctccggatgagggaggaggaatgggacgcggtcgtggccgtcaacctcaagggcatttttaatttcaccaaggccgtgcttcggagcatgctttcggcccgctcgggccggatcgtcagcttgtcctcggtcgccggcgcgatgggcaatcccgggcagaccaactacgccgcgaccaaggccggcgtcgtgggattcaccaagtcgctggcccgggaagtcggttcacgcggcgtcacggtcaacgcggtcgcccccggctatatttcgacccccatgaccttgggtcttccggaggcggtcaagcagtcctttctcgctctcatccctcttcaacggttcggcgaacccgcggacgtggccaaggcggtccggttcctgtgttccgacgacgcggcctatatcaccggccaggtgatccacgtcaacggcggcctttatatgtgacgatccaaattttcacaaggaggtccattatggacagagacgaattgctgaaaaagatgaagacgatcgtggccgacaagctgagcatcagcgaggaccaggtcacggagaacgcctccttcatcgaggatttgggcgcggattccctggacacggtggagctcgtgatggccctggaagatgaattcggcctggatattcccgacgaagaagccgaaaagctgacgacggtcggcaaggccatggaatacattctcggccatgccaaatagccgggaaacccgagaccatcgccacgatctgagacgcgtcgtcatcacgggagtggggctggtcacgcccctgggcacaggtgtctccgacgtctgggagaacgtgatctccggatcgagcggcatcggcccgatcacccgtttcgatgcttcccggcacgccacgcggatcgcggccgaggtcaagggattcgatcccctgcggtttgtcgaccggaaagaaatccggaagatggatccgttcatccaatacgcgatcggggcggccgttctggccgccgaggacgccgggattccgccggaccttttagccggcgaacggtgcggcgtttatgtcggttccggcatcggcggcatcgggacgatcgaggagtatcacaagatcctcctggaaaaaggacccgaccggatatcgcccttctttctcatcgccacgatcatcaacgaggcgagcggccggatctccatccgcttcaagtcgcgggggccgaactcggcctccgtcacggcctgcgcctcgggcgcccacgccgtgggcgacgccttccggatcatccagcacggcctggccgaccggatgatcgccggaggggccgaggccccgatcacgccgctgagcgtggccggattctgcgcgatgaaggccctttcggagcggaacgacgatcccggccgggcgtcgcggccttttgacaaaacgcgggacggattcgttatcggcgagggcgcgggcatctgtctcctggaggaactcggcgcggccgtccgccgcggagcccggatttacgccgaggtcgtcggttatggaatgacgggcgatgcctatcatccggccgccccggccgaggacggagacggggccgtgcgggcgatgcaagccgccctggatgacgccggcgttcccccggccgatgtccaatacatcaatgcccacggcacgtccacgccgctcaacgaccggatcgagacggcggcgatcaagaaggtcttcggatcgcaggccgtccgcctggccgtcagctcgaccaagtccatgaccggccatgccctcggggcggccggcgggatcgagacggccatcacggctttagcgatcaggaaccagacgatgccgcccacggcgaattacgaagtccccgatccggactgcgacctggactatgttccgggccgggcccggtctgctgaaatcgtttacgctctttcgaattccttcggattcgggggaacgaacgccacgcttctccttcgccggtgcgacggctgaggggggagaaagacgccggcgaaaacccggggctcgccgcgagccggcaagcccggggaatgaatgtgaggagaaaccgatgaatatccttgtcttcatcaagcgtgtgccggataccgaatcccggatccgaatcgaccgggaggcgaaatccatcgtcgaggaaggcttgaatttcgtcctgagcccttatgatgagtacgcccttgaggaagccctccggcttcgggaagccaaggggggcaaagtcacggccgtttctttcggccccgacgaagccttgtcgactctccgcaaagccctggccatgggggccgacgaggccgtgctgatcaaggacgacctccgggaggcgtacgatcccctgcggatcgcccgcgtcctggccgccttcgtccgcgcccgtcagcccgacgccggcctgattctcttcggccggatgtcggtcggatccgacaacgccgcggttccgccgatggtcgccgagatgctcgggcttccccaagccaccgttgtcaccaagctcgaaatcagcggccaagaagccgcagcctgcagggaaatcgagggcgccctcgaaaaagtcgccttccgtctcccggccgtcgtctcggcccagaaggggctgaacgagccccgctatgaaacgctcaaggggatcatggccgccaagaaaaaaaccgttcccgtcgtgacgctcgccgagctcggcttgtccggggaggaggccgtcccccgcgtggagatcctgagccttgagctcccggccgccaaacaagccggaaaaatcctgcccggtacggccgaggaagcggcccgggaactggtccggcttctgcggaacgaagccaaggccctgtgaggagaaggatgatgattctttgctttattgaaatccgggacggaaaaatcaagaaaagctcgctggagacgctcgtcgcggggcggagggcggccgaagccctgggttttccggcggaagcggtcctcgtcgggagcgctcccgaaggggcggccgccgaaatcggcgcggccggagcggcgaagatccatcatctccaaaatccggccttaaccgattattcgagccagggattcgccctggccgtcgaggggctcgtccgggaaacagcggcccgggccgtcttctttccggccacggcgatgggccgggatcttgctccccggcttgccgcccgcctgggcgttcccctggcttccgattgcacggccgtttccgtttccggcggccgcctggtcttcacccggccgatttttgccggcaaagccctcctgaccctcgctcttccggccgggccggcgatcgccaccctccggcccaacgtttttccgctggacgcggaacccggccccgaggccgaggttgtcccccacgcggtcgcgatcccggagggggccgtcgccggaaaagtcgcggagatcttgagcgagtccggggcggcgatcgatgtggccgaggccgatatcgtcgtcgccggcggccgggcgatgaaaggcccggaaggattcgcccggctttccgatctggcggcggtccttccgcgggcggccgtcggggcgtctcggacggccgtcgacgccggctggatcggccattcccaccaagtcggccaaacgggcaaaaccgtcagccccaatctttattttgccttcgggatcagcggagcgatccagcacttggccggcatgtcctcgtccaaggtggtcgtcgcggtcaacaaggatcccgaagccccgatcttcaaggtggccgattacggaatcgtggccgacctgtttcaggtcgtgcccgccttgatcgcggaaatcaaagccctcggctcctgatcatttccggcgggatcccgccggccgccgccgtcagcggatcagggcgttgaagaacagcttgaaggtgccgtgcgtctgggcccggtgctggggccggatgccgaaaaggacgacccggccctcgccgtgccggaccgaaacgacggccgcccgcccggccaggcgggattcccccaaaagccagccgctttggagaagatcgcgagaagcgaaggctgccgcgatctcagcccgctcgttgtgatttgttggaaggatctcgaaagccggatttcccatctgaaacacgaccagcccctcgtccggctgaccgtaggccaagggattctttggatcgtacgtcacccgcagggtcgatcccgggcaccagaaatccttgcggttgattccggccaggacgttgcggaccgggaggccgaatttctccacggccaggccgcaggcgcggccgaaggcgaccagcgtgccgcccttggccacaaaggacttcaaggcttcgaaaccttcggccctgattccgctgcggtattccggaggcgtggattccaggagtccgggcctgtgatccaatccttccccggtgatgagagccggcgcgtcgtccggaaggagaatgacgtcgaaggcggcgttcagtccgcccttttggatctccgcgtccctcagggtcgtgtacgggatcgcgaactcttccagaaggaggcgcgtccagccctcgtccatgttgccgccccagtagcgctggtacacgccgaggcgctgccgcttgacctcgcgaccggttcgatcgaggcccggctcgagggcccggaagtcgacgcccgtcgttcgggcgatttcggaaagcagggcgcttgacgttccggccggaacaaggaagtcgccgggacgaaggccgccggcgctttcttcggcccgacgcagccggatgccccggtcaagcagccgtccggccgccgcgaaggcgtcgttgaggcgcccgtcgagggaatggccggcggcgcttccggctgcgcgtccggccggcgcgagcgccccggtcagcgtttcaaagttcccggtgacggcctcgtcgagagcctccacccggacgcccatgaattcggccatcgtgtcggtggccatgtcgtaaggggattccggggttccgtccggccgccgggtgaaggaattgtcgggatagagcgtccggccgaggagatagcggatcaggcccattttgggctgagcgaggggaaccaggaaggatccggcggcataaggctttccgtcggcggctctgaacgcctcggccgcccggcggatttcgatgccctggtcgagcagcttgttgatcagcttgacagccgtcagcggatcgtgttggacggccgggatgatgtaggcggcgggctttccctgggcgccgcgctcggtctgtctccgggccttgagaaaggcgttccgcaggacggtctccttgttcctggcggccaggtcgagcaccgcccaagccgagattttctggcggtcgatgatgtcccgaagcctccaccagccgcccggccagggattggggaacgtggtctgggcttcgtaagcggggaatccgcggtcgtcgcccttaagctggtgggggtggatatagagcggcgaggccagcctggcgtcggccgattcggtcagcatcccggcgatgttgtgaaagggggtgatccagtggaatccgaaatgaccccagccggagaattgagccgcgttgatgacgccggacaatccggcttcttcctccttgtacgcgatatgcgccccgtaccagctgtgctcccgccagatcagggggtcggccagcgggcggatgggctcggcgtagggcggcacgtagatccgcggtccgtagctgcccatgtggtggtggtcgacataggcttggggaatccaatcgcggaacaggaggcgggccatgtagcgggattcgaccaggttggtctgaaacgcgtcccggttgttgtcgtggccggcgtatttgtggtagagccacggcaggtcggatccctcgtattccgttcccagggtcttttggtaccaatcgtaaaccatgaccgccccgtcgggattgaaggacggaaccaggagaaagacgacgttgtccaagatgcgcgcggtctcctcgtcggcccgcgaaacgagatcataggccagctccggggccatctgggtgcctccgatttcggtggcgtggagactcatggactggcagatcacggccttcccctcggcgatcagcttttcggcggccgtctcgtccaaatcgcgaggatcgctgaggcggaggttgatttttcggagctcttccaggcggccgagattgcgggaggaggaaatgacgaccagaaggaagggctggttcatcgtcgacggccccaggtcgacgaccttgatcttatcgctttcccgggcgaggaggcggtagtaggcgacgatcttgtcccagggcgccatccgccggtcggctccaagccggaatccgaaaaacgtttccggcgaggtgacggccgccgtttcggcggccggggcgggccgggggccgggcgcggcgatggacggaacgaaaagcgcaagcgtcaagatgaaggcggcggttctttgtttcatggcggcgtatcctccgtgagcgcggtttggcgcgccgccgggatgtctcgagggtttccccggcggcggtctcccaatctagtacagatgggccgggacttcaatcgtcgtcggccgcggccggtccggatccgcttactcgccgacgttcaagagcagctgattttccttcgaccggcgttccccgacgctcgtgacgaaaatcgccggccggtcggccaccgggcacttgttctcgcaaacgccgcagccgatgcacagctcgggatcgatgatcggagctttttccacggccgtcgttccgtcgggccgtttcgtctcgacgaggatgaacttgatcgccttgggagagacggggcaatgctcctcgcagacgatgcagggccgtccgaggaaataggggaggcagcggttcttgtcgatccaggccgtcccgattttgaccgtcgttttttccgggacggtcagttccttgatcgccccggtcggacagacctgggtgcagagcgaacaatagtactcgcaatagccgattttcgggaccagcaccggcgtccacaggccctcgggcccggcttcggtcagggcgggctggagaccgttggtcgggcaggctttcagacactcgccgcacttgatgcaggtccggaggaaggccggctcgggcagcgatccgggcggccggatgagatgttcatcggcccgagtccgggcggacgtgatccggaaaaacgggacgctgaagaaagccaaaaacgatgtcgccagcagacgccggcgggtcaaggcgacggccggcggcttctccgcgccgaggcggaccgggaacgtgatcgcccgctccggacagatcgccgcgcaggtctcgcaatacacgcactccgagcttttccatcccccggccgggaagggagcggcctgggtttggcagtggatcgagcagaggccgcattgggtgcacttcgattcgtcgattttcagcttgaacaggttgtatcggctgaagaggcccaggagcgcccccagggggcagacataccggcaccaaaagcgctcccggattttgttcagaagaacggctccgagaaaaatcaagccgaggagaaatccctgccggaaggtcgtgttcagggtcagagtcgagagagcctgggccagcgtgtcgccgaaggcctcgagcctgaccgcgtagacggccccgagaagggcgtccgctcctagaccgaaggccgggataaggccggcggccgaggcgcgcgtcaggaacgacagcgggtccaggtaccccgcggcgttgaggccgaagagggcggcgacgaggacgaaggcaaggacggcgtatttgatccataacccgcccgaggccggctttttcggccggaggaaccgcgctttcttgaaaatccaggaaaagagctggtggacggtccccagggggcagatccagccgcagacgatccggccgaacaggacggtgacgaggaccgtaagggcggcccaggcgaaataaacgaggaagacgcgtgaggcgaggatcgtggccgcggccaggagagggtcgaaatgaaaaaaagcctcgacccggccgatgtaatcctctccggtgaaatgcgcgccgaagaggaggaggaaaaacagtccgaggaacgccgcctggacggcgattcgggcgatctggaggcggcggaatttcttagagcgttcttttttcaatgttcatcttctccagatcgatccggccgatgtttctttcaacggcgaagcgcaggagagggagctcggcggggacgatatcgaaaagaacggctcccatggcttcgaccgcggccgcgtccgttccggccacggccgtcttcaagagcttggtgtccgacggccggccgccctgggggccgttgcggatgaggatccgccaggcgtcgagaacggtcagcttgggcttgaagaaggcggccaaatcggccgaggcctcgtcgatgcgctggtggaggcggttgcgcgggtcgccgatcgcccccagccagttcttcatccccagcgtcacccggcagaggttgtggtgcttggcgatcggaacgttgatgagggcgtcgcattcgacgaagtcctggatcacgtcccattccttgagccaggcgccgccgatggtcattttcttgatccgcctcgggttgatgaagggcacctcggccccggcttccctggccgccgcctggatgcccgagcggacatagcagcgctgggcttgattggtggtgttgtccatcaccgcgacctttttcgccccggcggcgaagctgagctcgaccagggtccggacgatgtccgggttggtgcaggcggccatctccggggtgcggtcccagccgatgttcggcttgatgagaacgacgtccccccgggagacaaaccggttcatcccgccgagggcctcgacggccgcccgggcgatgtccgccggcgaatttccctggatgacggccaggtcgggcgggccgggggccgcggccggccggccgatcaggccggggacggcgctgagagccgcgccgccccagacggcgctcttgagaaacgttcttcgtttcatgggtttatcctttaccgagggaacggatgtaggctttgatcccctcgaaaattccccgggcgatattctggcggtacaccgcgctctggagccgcttgatctcctcgggattggaaagatgtccggcttcgatcaggatcgccggcatctcgcttcccagaagcacccagaacgggccgcctttggcgcccaggtccttgacgccggcgtagtgacgggaaagatgggaagccagggcggattggaccgtccgggccagctcccgggattcgatgatccggctgttttggacgactttcttgacgattttgtccatctcgccgatggtttttgtcgtcgtcgcgttttccttggctgccagctcgttgaccgcgggatcggggctgaaattcaggaagaacgtctccagcccctgccgcgctttcagccggtaggcgttcacgtggatggagatgaacaggtcggctttccgttgattggcgacgatggtccgcgcttccaaggggacgaagatgtcggtttcccgcgtcaggacggcggacagatcggactcggcttcgaggatcgctttgagcttgagggcgatgtcgagggtcaggtccttttccttcggaccggccggatcgagacagcccggatccgatccgccgtgcccgggatcgatgatgatcgtccgcacgcccagcccgagctggcgggcgaggctgtatccgccccccgccggctgggcgggcttcgggattttttcagccggcggggcggccgccgcggggccggccgcggggtctttcggataaatgtcgatgacgatccggaacggatcaaagaggttgaagacgtcataccggcggacgcggtcccagtcggcctcaatcgtcaggcgcacggtcgtcggattctttgccgcgagacggagacgccggatgtagccggcgccggccggggtgacggtttcgggaacgatgggattaagccgggcccggatgacgtcgacggtaatctccggcggcgtgagggtctcgttccagacgtattcccgcggagcgcccacgtccaggacgatgcgggtgtagttgggatgggcgtaggaccggacgttatagacttcggagaggacgggaacgtccgttttttcggccggggcggcggctaaggagagaatcaggaccgggaaaatcgtccagagacggcctgttcgtccactcatccgttttgttcgagaaatattataacacggttgatttgccgaaaaagacgggccggcggaaggaccgccggctcgtccggggaaggcctccgaatcaggcgccgtattttttcaacttcccggcatggccgagaatcagcggcatggcccgaagcgagggaaagcggccgaggatgcctttggcgcaggcccgctctgagaaggcgacgacatcgtcgggcaaggcggtcggggcggccaggaggaacggattcgggtggaaggaatgcccgcgcatcaaggccggggtcgagtggtcggcggtgacgacgagaacgtcgggtttgagggcttcgatccggggaaggaagcggtcggcctcctcgatcgcccggaccttggcttcgaagttcccgtcttccccggccgcgtccgtttttttaaagtgaacgtagaaaaagtcgtggtctttccagcgggcctcgagagcggagaagaggtcctccggctcggggccgactttataaacatgcattccgatcagccgggccaaacccttgtacatcggatagttggcgatcgccgccggccggagtttgaacaggtcggccatggtcgggatggtcggctgaaccgagaagccgcgaagcagggcggcgttggccgccggctcgtccttgaggatccctagaatctcgtcaaggaaagtgttgacgatggaagccgctttctccgaggccgcgtccagcgcggacgccgggacgcggggcttgccgtctttctgcggatcggcgtcggtcaaggcgtcggagagcccgggagcccggaaccgggcgacgaagcggtgttccttgccggcgaagagagtgatttcaggattggacattccggcccgggcggcgttgattttggcgcagatccgttcgcactcgctcgtcggaatccgtccggcccgccggtcggcgatcaagccgtccttgagagtggcgaagtttccccgggcgacgaggtcgccttcccggacctcgacatccgagcccagggcctcgaggattccccggccgagccggtggcggaggggatcgtagccgaaaagggccaagtgggccgggccgctgcccggcgtcacgcccatgaggaccggatcggtgagcccgcagctggaccgggcggccaggcggtcgaggttcggcgcggccgccgtttccagctcggtccgtccgtttcgcggcagcccgcccaggccgtcgatgacgaagagaacgatcttcgtgtcggtttgaaccgcgagctcgcgggacagttcttcaaagctcatggcgactctccgaatgaaatggaaacgatattatagcataccgcgttccccgggaggggcgcgcggactccgttctcggacatgccgcgaacccgccgctttcgcccttgaggccccgggccgcgggtgatacaatcgcttcgtgaataaaatcctggtgattgatttcgggtcgcagtatacccagctcatcgcccgcaaggtgcgggagctgggcgtgtactccgaaatctggcctccgacggccccggtcgaggcgatccgggccgcccggccgcaggggcttatcctttcgggcggaccgcaaagcgtttatgggaaaggggctccgacgatctccccggagatcttcaccctcggcgttcctatcctcggcatctgttacggactgcagctcatggcccatcttctgggcggccgggtcgtcccgtctccccggcgtgaatacggcttcgccgctctccgtctcgtccgccggagcgggctgctgtccggcctcaaagacggcgaacaggtttggatgagccacggcgacaaggtcgaaaagctcccgccgggcttccgcgtctccggccggacggggaacacgcgggccggagtgatcgaagacccgcggcgcgatttctacggcgtccagttccatcccgaggtcatccacaccaaggaaggccggaagcttctagctaatttcctcttcaagatcgccggcctgatccccgactggaatatgggatcgtttatcgagcgcaagaccgaggagatccggaagacggtcggccggggccgcgttctctgcgggctttcgggcggcgtggattcgctggtgacggccctcctggttcaccgggccgtcggaaaacgcctgacttgcgtcttcgtcgacaacggcctgctccgggagggccagtatgccggcctcatggagatgttccgggtcaagctcgacttggacgtcgtcggcgtggacgcggccgcggccttcgtcaaagcactgggcggcgtctccgacccggagcggaaaaggaagatcatcggcggcttgttcatcaaggttttccgggaggaggcccgccgcctgggcggggcgaagttcttggcccaggggacgatttatcccgacgtgatcgagagccgtcccgtccaggggccctcggccgtcatcaagtcccatcacaacgtcggcggcctgccgaaatcgcacggcttcgtcctggtcgagcctctccgggagcttttcaaggacgaagtccgggccgtggccgtggagctgggagccgaccgggccttcgtcgcccagcatccgttcccgggccccggcctggccgttcggatcgtcggcccggtcaacgaggaatccttgcggatcgtccgcgaggccgacgacatcgtcgttagggaagtccgggcggccgggatctacgaccgcctgtggcaggccttcgccgtgctgctgcccgtccgaagcgtcggagtcatgggtgatcggcggacttatcagcgggtcgtcgtcatccggctggtccaaagcgtggacgggatgacggccgactggttcccggcgtcccccggccttctggcccggatctcgaaccggatcgtcaacgaggtggccggagtcaaccgggtggtcttcgacgtcaccagcaagccgcccggcacgatcgaatgggaatgaatccatggcccccggcttcatccatcttcacaaccactcggaatacagcatcctggacggcgccgtccgcctggacgccttggtccaggccgccgtcgaccacaagatgccggccgtggccctgaccgatcacggcaacctcttcggagcggtcaagttccagagaatcgccaaagacaaaggcgtcaagccgattttcggctgcgaggcctatatcgccccgcggagccgccgtgaccgcgagctccgcgacggcgagccggcccactatcatctcttgctcctggtcgagaacgagaccggctacaagaacctctgcgtcctgttgtccaaggcctacttggagggattctattaccgtccccggatcgacaaggagctcctggccgcccacagcaagggactgatcgggttttccgcctgcctgcgcggcgagatcgcctatctcttcggtcaaggccgggaggaggcggctcttcgggcggccgaaagctatgccgagatcttcgggccggggaatttctatatcgagctcatggatcacggcctcgagccgcagcgggaggtcaatcccaagctcgtcggcctggcccgccggctcggcctgccgcttgtcgccaccaacgacatccatttcctcggcaaagccgacgcggccagccacgacgtccttctttgcatccagacgaataagaagatcagcgataccgaccggatcaagttcggctcggcggagttctatttcaagccgccggcggagatggagcggctgttcggcgaaatccccgaggccctcgacaacacttttcacgtcgccgcccggtgcgatttcgaatttcccaagggaacgtatttcctgcctcggttcgagccgccggaagggaagtcgctccgggattactttgaggaagtcgtgtgggcgggattttccgagcgggccgacaaactccgcgatctgcgggccaagggcaagcttgtccatgaccttgacgcctacaaggatcgtctggagagggaaatccagctggtcaagcagatgcagttcgaaggatatttcctcatcgtctgggaccttctccggacggcccggtcccggaacattccggtcggtccggggcgcggctcggccgccggctcgctgctcgcctactgccttcagatcaccgacatcgaccctctcgagtacgatcttcttttcgagcggtttctcaatcctgaacgaatcagcctgccggacatcgatatggacttctgcgcccgccgccgggcggaaatgatttcctatgtcaccgagaaatacgggcaggagaacgtcagccagatcatcaccttcgggacgatggccgcccgggcggccatccgagacgtgggacgcgtcctggaagtccccctgagcgaagtcgataaagtggccaagatggttcctctcggtccggacgtcaagatcgcctcggccgtccaggacgcgggcccgctccaggaatacgtcgagaggaatcctcggatcaaagcccttctggacatcgccgagaaggtcgagggccaggtccgccacccgtcgattcacgccgccggactggtcatcaccccgcggccgctgactgaatttcttcccttgtaccagtcggtcaagggcgaggtgacgacccagttcgccatgagcgaaatcgaggcgatcggcctcctcaaaatggatctcctgggcctccgcaacctgaccgttatccgcgacgcccagaacctgatcgccaaggacttcgggacggccccggacgtggacgccctgcccctggatgacgggccgacattcgatcttttcaaggccggcaacaccgacggggtcttccagttcgaatcccaagggatgaaagcgctcctgcggagctacaagccggaggagttccgcgacttgatcgccctgaatgccctctaccggccggggcccctgaagagcgggatggccaatgacttcatcgagcggaaattccatcccgagaagattgtctatgacattcccgagctcaagccgattctcgaggaaacccgcggcctgatcatctaccaggagcaggtgatgcggatcgcggtcgagctggccggtttttctttgagcaaggccgatcttctgcgcaaggccatgggcaagaagaaggccgagatcatgaccgcccagaagcagaatttcctggacggggcgaaacggaagggcgccatttcggcctcgaaagccgcgaaaatctttgaccagatcgccaagttcgccgaatacggattcaacaaatcgcacagtgccgcctatgccgccctggcctatcaaacggcctatctcaaggcgcatcacccgacgcatttcatggccgcgctgatgacgtccgaggcggagcgcggggcgacctcccagatcgtcaagtacgtcgccgagtgccaggtcctcggcctcgaggtccggccgccggacatcaacaagagcgatttcgatttcatcgtcgaggaccgggccgtccgcttcggcctggccgcggtcaagaacgtcggcgagacggccgcccgggcgctgatcgccgttcggagggagcgcggcccgttccagacgattttcgacgtcgtcggccacgccgacgggcggatcatcaaccggaaggtcctggagagcctgatcaaggcgggcgctttcgattcgttcggactcccccgggcccgaagcttccgcctgatcgacaacctgatcgactacaaccgggagatgcagaaaatccgggaatcaacccaatccctgttgttcggaagagacgcgctcgcccctccggagattccggccgaaatcgccgcgatttcggagtgggacgagatgctcaagtggtcctacgaaaaggaagccttgggcttctacatcagcggccatcccctttcccattaccggcgcatcctcccccgtctgacgtcccactcgacggcgtctttcgaagaggaagccgatatccccgaggagatccgggtggccggcgtgatcgccgatttccagatgaagaaaacgaagaaggacgaacggatggccgtcttccagctggaggacttgaccgggcgggtggaggtcgtcgtctacgccgaaccctacaagcgctattaccatgttctccaggagggaagcctcgtctggatcaagggccattaccagctcgacggcgaaacccacaagatttacctgtcccacatcctgcccctggaggaggccgcccagaagctggccaagaagttcgtcgtccggctgcccgcccgccccctgaacgaggccgttctccaagacatgcgggaagtgctggagaaatcgcccggcgaatgcccggccgtgttcgaattggaaacgccgtcgggtcaccgggtggtcctccaaagccccgagctgaaaggcgtgacgcccacggacgacctgctgacttctcttgaaacgctcctgggcccggattcgatccgggttgattattgaaatgagcatgaaaatcctcctggccgacgcttcccccgtggtccgcaaggccgtggaaacggccctgcccggagcggaatttgaagtccggaccgcgcccgacggcctggccgcgatccggatccttcccgaattcttccccgacgccgtccttgtcgctctttccctccccggcatggacggatacgatgtggccgcctttctctgttcccaaccggtctaccggacgacggcccttttccttctgccgggcgccttcgaggccgtcgacgtggccaagctgtccgtcatccggcacgacggcttgatccggaagccgtttgacggggaaacccttttgagccggatccggacggcgatcgatcgcaaaaaagagctgccctcgcttcccgaggatccctttctcgagccgcagagtcttcccgagaccgcctcggtcgcatccggcccggtcactccggactcggggaacctgcccgagtggaccgacgacgtcgagcggaaaatccgggacgtgatccggcaggaaattcttcgcaaccaggccgaaatggaggaacgggcccgggacatcgtctcggccgagttcaagaaggtcctggtcgaggagctcaaggccgtcgacggcaagcggtgaacgcatccccatgaatgactcggtctgcttcctggacacgtgtgtttcgacgaatgatgaggcccggaaacgcgcccgcgagggcgctccggccgggacggtcgtcgtcgcccgggaacagaccggaggacgggggaccaagggccgctcctggttttccccccggggggcgggattgtatgtctccgtcgtcctgcgtcccgggacggacgccgcgctttcgcttctgcccctggccgccggcctggccgcccgccggtccgtggagcggacggcggggattccggcgaaagtgcgctggccgaacgacatcgtctggcaagggaggaagctcggcggaatcctctgcgaaagcggattgtccggatttcgttcgcgctacgcgatcgtcggcctcggccttaacctcagtcaagacgaaagcgatttcccggaggaatggcgggcccgggccggatccctccgcctggccgcggggagaatcatcgaccgggaagacgtcctcgccgcgttcctggaggagctcgagggagcggtcgcgcctctcttcgaaaagcggccggaggacgtggtggacgcctttcttctccacgccgaagccgggccgggggaagcgatccggcttcgaacggcgtcgggggacgttgccggattgttcgaggggctggatatcgacggggctatccgggtgagaacggccggggggacgaggcggtttgtctcggccgaaatcgtttcgttcggcctcgaccgggccccttccggcgagtcatttggagtataatcggaaaaaggaccgccttcaaatcaggtccggaacccccggatccgggcgaggagaaaaacaatgctattggcctgcgatattggcaacacctcggtggctttcggcgttttcgaaagccggaagctcgtccgggaatggcgtctccggtcggatcgggatcaaaccagcgacgaatacggcgtcatcctcctcaatctccttcgcatggccgggatcgatccggccgccgtcaaggcggcgatcatttcgtgcgttgtgccgcccctgaccccggttttccagaagctctgcgggtcgttgttcggcgtcaggccgttcgttgtcgggccggggctgcgcacgggcatgcccatcctctacgatgccccggccgaggtcggcgcggaccgcatctcggcggccgtcgccgcctacgagaaatacggcggtccgtgcatcgtcgtcgatttcggcacggctacaacattcgacgccgtctcggccaagggcgaatacctgggcggggcgatcgctcccggaatcctgatctcggccgaagccctctatctcaagacggcccggcttccccggattgaaatccgcaagccggaccggatcatcgggaaaacgaccgtgggcagcatgcagtcgggcctttattacggctacatcggcctgacgcagactatcatcgacgggctgcggaaagagctcggggagaaaacaaaagtcgtggccaccggcggattcggcgaagaaatcgcggctgaagttccggccatcgacgccggcgagccgaatctcgtcctggaagggcttcggatcatcttcgaacgacagaaggaccggccgtccgagccgtgaaggtcgtgatcgagggatgagcgacgagccgagcgcagccggattccgggagcggtatttccgcggcatcgccgaccgtttcatcgccctgcggggagcgccgttttcgctttccccggccgacatctgcttgatcgaagcctgggaatccgccgggatccccctcgaaacggtcttggagggcctggaggcggcgtttgccctccgccccggccggggccgcgcgccggggaagatccgaacgttgtccttctgccgggcggccgtcgagcgggccctcgagcggagccgcgagcgggacgtgggacgacggagtcccgagttggaaacgagatcaacggagaaaatcgaaaaagcccgggcggccgtggatgaattcctcggccggcggccggccggatttgccgcgctcctgcccgaattcgagaaggctcggtcgctcttgaaggcgaagcgtccggacgacgaggccctggagcggctggacgggaagatcgacgcctggatccgggactcggccgggcccgcccgtctcggcgacgccgaagcggccgtcgaccgcgaccaccccggtcttcgcggcccggagaaggaatccgccgcccgcatccggctggtccgaaatctccgggagaaacaccggattccctatgtgtcgctctattattattgagcggatgcggcccggcccggccggggccggcggcctccgccggtgaaaggatcgccccccatggccaaagcgcaaagcgatgaagcccggattctcaaccttctccgccggaatccccagggcctgaagctccgggatatcttcaaggagctgcgggtcgatcgcaaatcccgggccaaggtcgaggaccgccttcagagtctcgttcatcgcaagctggcccgtcgggcgagggatcgctggctcctgccgccggcctccgacctgcggaaaggaacgtttgaaaccttcggccgcggcttcggcttcgtcgtctccgaaaagggggaggatgtctttgttccatcccggttttcctccggggcggtccacggcgaccaggtcgaggtgatcgtgaacgcgtccggccggagcgggcggctggaaggccgggtcgtccggatcgtcaagaaagtcaaaaagcggctcctggggatcttcggtgagcggttcggccgcccgtttttcgtcccgttcgaaaccccgtcggccgaggaaatcccgatcgtttcccggggatcgtttttcccggaagccggggagatcgtttccgtcgagcgggcggacatgaaaatcgtcgaggtgctcggccggccggacgatcccggcgtcgacgcccaagtcatcatccgaaagtacggactggcggatgctttttccccggcggccgaggcggaagcggagcaaaccgccgccgtctccgcggccgagacgatcgccggccgggccgatttccgctcatggaaaacgttcacgatcgacggcgaggccgcccaggacttcgacgacgccgtctccatttcccggaggccgtccggcggcttccggctcggggttcacatcgccgacgtgtcgcattacgtccggccggggacggccctggaggccgaggccttcgcccgggcgacaagcgtttactttcccggcctgaccctgccgatgctcccggcccggctctccaacgatctctgctcgcttcggccgcgcctcgagcgcttggccgtttccgtcgttatggatttcaatgcggagggggagcggatcgggacgtccttccatccctcggtcatccggacggtcgaacggatgacgtacgattcggtcttcaagatcatggaaaatgatccggccgagcgggaggcccgcgcctcgatcgtccccgacatcctggacatgcgaacgctggcccgggcgatccggaagcggcggctggcgggggggagcctggacttcgacctggtcgagccggagcttgtctaccaggaagggaaagtcgcctcggtcgcggctttggcccggaacgaagcccatgagctcatcgaggaattcatggtcgcggccaacgtcgccgtggccgaatatctccgcctccgcgggatcccctccctccaccgcgtccacgaggccccggccgaggaggacctcgagaagctccgggcaacgctggccttcttccacatcctgctccccgaatccaagaggatcacttcccgggatctacaatccgccgtccgggcggccgagggaacgcggctcgagaagttcgtcagcgtccagatcctccgggcgatgcggctggccgaatattcctcggaacgatccgggcacttcggcctcgggctcaaggattacacccatttcacctccccgatccgccgctacccggatctcgtcgtccaccggcttctgaaggacgacctggccggacgcgtccctcgcccggccgggctcgaggcggccgccgttcattcgtccgaacaggaacgcaaggccgacgcggccgagaaggacctcgtcgaatggcggatcttccggtttctcaaggaacgcctcggcgacgtcgtctccggtctgatcgtcgacttttcccgcggcgggctgatcgtcgagcttgacgagtatttcgtttccgggttgctcgcctacgacgacctgggcggggattatttcgccaagcgctcccgcggcgcgctgaccggcaagcgcaccggccggcaatacgagctcggccagggcctttccgtccagatcgccgccgtcgatcccgtcaaccggcggatgagcctggtgttgccggcggagcaagagccagccggccccgaacgaaaaacaagccgcggccgaaaaaagcgcggacattgaattccgtctttcattgaaaggatttcctcttcagccatcaagggcgttcgtcgaggctgaaacggacggactcccggggaggcctgtttcttttctttctttctcgtttcccttacaatgaaacgcggtttcgagaacagtcaccatgcgcgcctcccaccctccgattcccaagcgtcttccggccggcgacggccccaagatcatcgccctggccaaggcttatggattgcaggggctccggcaaaaggatttagccggcgttttccccccggatttccagggattgaccgatctggccaaggcgctggagtccgaaggccggatccgcatcctctccttcgcccctctccatcttgtcgcccgggaggcgatcgattatttcgaggagaaattcgtcgcctatctcgagaaattccattcctcgcacatcaaggagcgcggcgtcgccctttccaaaatccaggagcgcttcgaaatcccgcgccagattttgcttctgtgcctgaaaaccctcgtccatgagggcaagctccgggaggaccacggattctacgccctggccgatttcgtccgggagctgcctgagcgcgaagaacgcatcctccaaaagatcgaagaggaatgcttcgccggccgtccccgctcggtttccccggctgaagtctgcgaacggatgaatctttcgcctgaaacccggaaccagttgttggacattctggtcgagcggaaacggatcatcgccggaaaagacgggtattacgtccaccggccgtggctggaggatctgatcgaaaagcttcgggtcaaaggaccgcgggacctgccggttgcggaattcaaggagatgacgggcctcagccggaaatacgcgattcccctcttggagctgcttgacgaaatgggcgtcacccgaagaaagggcgccggccgcgagattctggaagagccctcgtcgccgtcttcgaggtcctagtcaaaccaggtgtagaaagaaatccccgcggccacgatccgcgggaacgttccgtcggaagcggagtctccggccagggggacgacgcgccgaacgccgacaaacggccggacggacacgtcccggccgaaatcgaggaaaacccgggcttcaacggtgcggcgggcgtcgttggcctcgaagaggacatcgaggccggctttcaggtccgccgggccggtcgtgttgaggccgatcttcatcccgaagtcataggcgaacttgaaatcgaagcccgcccgggcctcgaagcggatcgggccgtcaaggcggttgaaatcgggctggtttcggatggccagaccggtggaagcgccggcccggaatcgaacggctttatccaccggcatatcggcgatgtaacgcccgtagacggaggcgaacgccctcccgaccggccgctcgtattcggccgtgacggagtacatcatccggtccggccagaattggccccagaaaccggaaccggtcagaaggggcgaactgaaggcggtgtcaatgaaaaagcgccgggattcccggcggagaagcggcaggcggaaggtcccgtcgatcatcaccttgtaggcgtcgtaaaagggatagactccggccgtcacgtcaaaggcgtcgagaaaccgggagcctccgccgtaggctccgaaacgaacgccgacgtgagtcgccgccgggagccgataggtctttaagccggccagcaccagctccgcgcctggggaaagggcgacggccagctccgcctcgtagaggatctcggagaaattcacccatttgacctcggccgcccaggaaatctccgggaaaaggagtcccgtcccggcggcctcgaaaaccgccaagccgtcatagccaggggttcctccgagatacgtccccaagccgaagccggcccggaatccgccgtgtcgaagccggaggcgcccgacaatctcgttgaggttcagaatataatcgctgaacagcgacgtctggtgccggcagaaatgattcaagctcgcctcggcctcgactccggccgacaggggggcggcccagccggcccgaacccagaagtcgatcgggccttccatgtcgccgttgattttttggaggtagctcaggtcgagaaaaagcccgttcccgccgggaccgccgagcggcgcggacaagcggaactccggctggtaatatttgcgttccagggaatccaggccgaacgcggtccggaaccggccggccggacgagacgtttcttcccggccgagaaggctgctcggaacgctaacgagaaaaaaagcgagaggcgcggcgaccgtgaatcggccgatcacgccggcctttctctgcctgcccatgaaactcgaaacgggaagcggttcaggacgtttcgtccggtttgtccggctcttcggccttttcccctcttttcttcttcagagcgaccttgagcttctcggcgaacaggccgccgccgaacgcgccaagcgggccgggcccggccggcggagccgtttcgaccgggacttcgggctgttcgaattccgtcttatcggcgggaagctccagcccctcgctttccgcgcctttttcggcgaacagcgcctcgcgcacggactcgagctccacgagctcctcttccttgacccgccgttcgcttttgcgggatctcggccggcggtcgctttcgaggccgattttcttcttctctttttcttttttaggagggggggccgcttccttctcgattttgactttcttttccgcctcgaacgcctcgagctcggcctccgcttcggccatcgctgcggcttcttcctctttccgagccgcggccggcggcgccggcggcggggcttgctcgagaatcgtgaactcgtgttccaggaagtcatccgaggtcagctcgccggcctcttcggaaatgatttcctcggccgcggcttcttctccctccgcttcctcgacaggcgtctccgaaggggtttcatggtagtagaaaatccccttcttcttgtctgatttttcaaattccggactgttgagaagggtgaattccacgtcctcctgggtggtccgccggagaatgtcgacaagatgataggcccggaggtaatggagggaataattcgccgattggaggctgaactgcttgaaaaccaggatgaggagacccttgaggtccaaccccgtccgctgcgggatcaggaccgtcagccgctcgaggtgttcgcgttcgagatagatgatcttgttcggcatggccagggtggccatttcgcccgcttcggcgaaggtgtcgcctttggtttcataggccatgcgggcgacttggatcttcttcttcgactttttcagccagaagttgaactggatcggaccggttttttccagggtcatgcttgtgccctgggggatcgccgttgtttcgaaatattcgcgcagccccaggaaatacccctgctgggggaagtaatggacggtgtagcttttcttttcgtcggcgtcggtgaaaacatattcccgggcttgggacagctctttgttgaatcccttggggatcttgacgccgccggagaggatttcccgccagccgaggtagactttcagcggaaactcgtggaagggagtgacggcgatcgtttcctcgttttcaaacggcggaagggcggccatgggagccgctagaggcaggccctccggcatggccgaaagaacgctcttgagcatccaccggccccagtcgaccggctgaaccaggacgaaatccctccggtattttgtttccaggaggcggttgagggccaggcaatggaggtcgaagagatcgtgggacggctccatcctgaaaaacgtcgagacaagctcggccgtcgcggccgaagccttggtctcggccaggtgggcttcgatctccttgatcgtttcttccggcagggagggctgggcggccgtcagctgccaccggtcgccccaggcgaaaaaagccggagacttggccagggccgcccgcagcagccgttccagggttttgaggtccctctcggtcatcggcagctcggtcagccgaggatcctcggcctggggcatgatccggggcgggcggtttgtcccgccctcgttggccgggagcatcacttggatcttggactttttcatgtagtcgatgtgcttgcggaaggtgccccctccggtgtaatcgacctcgagcatctcgcagtcgaagtccttgtaaaagaacttgcggatgacggtcaggacaacggccccctgaaagtgttcgtggaccttcgccccgacgatcagatcctcgtcatattccttgcagatcgtatccccgacctcgtaggagcaggccggatcgtagagcttgacggcccgggtcctctcgccggcggttttctggtaagccagcttgccggcgagatctttggtcgtcgtcggtttccgcgagccggccagctccttctcgatgaaggagatgtcgtccggggtcacctggacgagagcgttgtccttttccatataggttctcgtttatttgcccatcaaggccagcatgatcgccttctgggcgtgaaggcggttttcggcctcatcaaagacgatggaccggggcccgtcgaagacttcagccgtgacttcctccccgcgatgggccgggaggcaatgcatgaagacgcagtcgtccttggccttggacatcagggcttcgttgacttggaaggaggcgaagagcttcaagcgctcctctttctcggcttcttggcccatcgacgtccagacgtcggcgtagatggcgtcggctccggccacggcctcgaggggatcgttggtcacgatcagctcgaaatccgatccctttccgtcctcgagggccagccggacgatctcgggattcggctcatagcccttgggaacggccgcgctcattttgcagccggccttggccgcggcgaacatcaggctgtggcagacgttgttgccgtcgccgacccaggcgagcttgatcttggagatgttgcccttgtgttccttcagggtgaagaaatcggccatggcttggcagggatggaggaggtcggtcagagcgttgatgacgggcacggaggcggcctgggccaggcggatgacattgtcgtggccgaacgtccggatcatgatcccgtcgacccagcgctcgaggttgtgggcgacatcctcgacggtctcgcgcttgccgatctggatctcgctggggctgaggtagatggcttttcctcccagttcgagcattccgacttcgaaggtcatccgggtccgcagcgacggcttctcgaagatcatcgccagaacctggtttttcagcttctttcggtattcgtccggatcgtctttgatttttttagtctggtccatcagttcgaagaactcgtaccgggtgaggtcgtggatggagatgaaatctttcttcatatcaggctccttctgttttgtggtcgtctctgacgatccgggttccggaccggccgagcaaagccgccttcaggtgggcggcgtcggtgatgaggacttccttgccccccgcctcgatatattcgatggccgcgcggattttcggccccattgagcccgggggaaactggccttcggacaaaaaccggcgggcttccgagacggacaaaaccgccacatcgcgctgccccggcttgccgaagtcgaggcagacgcggtcgatggccgtcaggatgatgaacaggtcgaccccgatttcccgggcgatgaggctcgaggcgtaatccttgtcgataaccgcctcgatgccctcgtacaggccgttgccgttgaggatgacggggatgcctccgcctccggcggcgatgacgatccggcccgcctggacgaggtcgttgataatccacttggggacgatgtcgatcggcttgggcgaagccacgaccttgcgccagccgcggccggcgtcctcgaccatcgtccagcccttttccttcttcaatccctgggcccgttcggctgtgtagaacggcccgaccggtttggtcggcttggcgaaggccgggtcgttcttgtcgaccaagaccatcgtcaccacggtcgtggcttccttatcgatcgaatggcgccggaactcgttgaccagggcccgttccagcatgtagcccatgctgccttcggtcatggcgtcgcagagatcgagggaatagggggggatgtggtccgccgccgcctcctgctggatgagcaggttgccgacctgagggccgttgccatgaacgatgatcagctcgtagcccttgcggacgacggccgccatcagccgggcggcgtcctcggcgttcgcaatctgttcctcctgcgtgcccttctgcttttcggaaagaagggcgttccctccgaaggcgatcagggcgaggcggcgtttaacggcggacataagactggggcctccggtttagaatttctgaaggacgtcttcgatcgtcggagagccgatttcctgcagatcgtaaccgaccggaagcatcggcttgcgggtcttgatcagccggttgaggtcgatcggcgtggcgctgatgatcaggtcgcaatcgaccttgtcgatcgtcgcggccaaatcggcgacctgcttttcgccgtagcccatcgccggcaggatcttgaccatgtggggatacttggcgtaggtcgcggcgatcgattcgaccgcgaacggccggggatcgaccagctcgcccgcgccgtatttctcggccgtgacgacgccggcgccgaacggcatgccgccatgggtgacggtcgggccgtcctcgacgacgagcacgcgcttgccccggatctgttcgccgttttccacatgagtgggggagtcggccttgatcacgatcgcgccgggattatacgccttgatgttctctaggatcttgtccacgccctctttcggggccgtgtccatcttgttgatgacgatgacctgggcccggcggaagttggtttcgcccggataatagaggagctcatggccggcccggtgagggtcgacgacgacgatctcgagatcagatttatagaaggggaagtcgttgttgccgccgtcccagagaatgacgtcggcttctttttccgcttcccggaggatggcctcgtaatcaacgccggcgtaaacgatgatcccggccttgatgtggggctcgtactcctcgcgctcctcgatcgtgcagtggtgcttgtccaggtcctcgtaggcggcgaaccgctggaccttctgcacggccaggtcgccgtagggcatcgggtgccgaatagcggccaccttgcggcccttggcgatcaggacggcgccgaccttgcgggtcgtctggcttttgccgcagcccgtccgaacggcgcagatcgagatgacgggcttgacgctcttgaccatcgtatcgacggggccgaggaggatgaaagacgccccggcggcctggacctgggaagcccggtgcatgacgtattcgtgggacgtgtcgctataagagaaataaaccttggtgacgttatttttgcggatcagatccgtgagctcttcctcggggaaaatcggaatgccgtcgggatacattttcccggccaaaacagccgggtacttccgcccggcgatgtccgggatttgagtggcggtgaaagcgacgaccttgaagttcgggttgtctcggaaatacgtgttgaagttgtgaaaatcgcggccggccgcgcccatgataatgacgtttttcatagaaactactcctttataaaaaataggaacgttaagttttaaaaaaataaggagatagtatacaacagccgctccggtcacgcaacttgccgccggaagggggctttcactaaaatctgctcggccgggcttggaaccggccgattttccttgaagttggctggagccgcgccgggcatgatgccttggttgcccgggccgtgaagccggcggccgcccgattcgattccttttacggcggagcgccccctttttcatgaaaacagccctggtcttggtttattttaaagaatatccgtcttccaggatttatccttgcggttgtatgcttttttgccttttctcgtcgtctgggggcgtcccgggggcgggatgggcttgcgaatctgccgccagacgggcttttgccggttggaaacggagtgagacatgtccgcctcctacagggtgtgtatcgaagcccggcccgtcgccggatcgtataaggcgaccgtgcttcgaccggtcacttgacctccggtctctccggggttgacgagcagcgtcgatccggccgtccggatttccggccggtgggtatgaccatagacgactaggtcgtattcccggcgggcggccagtcccccggccggggcgtccagatgagtcaaggcgatctttttcccttcataaaaaaaacaatagggggctcttcggatcgtcccaaaggatccgattatcgccttcaacccttctttttcaccgtcgcagttgccgaaaaccgccttgaggccgcacccggaccggttcaggacccgggcggaaaaaggggcgacgaagtcgccggcgtggatgagcagggcgcagccggcgtcttgaaagaagcggatcgctttctccaaggcgtccaagttgtcatgggaatccgatagaatcccgatcatgcccggattatagccgagcggagtcgaaggaggcaatgtgaatcgccgcggcggccgggattctcctgccggccgcttccccggtctctttcgccccccgggctctattctcttatttccggttgattttgactttggttttcattaatataattgggctttggtgacggatataggcgcgtagctcagtgggagagcgcttccctgacacggaagaggccgtgggttcaatcccctccgcgcctaccacctttgccggagcgatgtacggaatccgatgaaacagaagacgttttcgacgtttacgacgccggccgtcgcgtaatatggccgggccggccgttctccatagaagaggggttcgttatccggcgaaacgtccgaagcgggacttttgtcttcaggaacgggacgtttgaaatgactatggaaaaatcgaaaaaagaaggagaagcggcgctggacgttctgcgccacagcgccgcccacctgctcgcccatgccgtcctgaacctgtttccggggacgcaggccggcatcgggccggccgtggagaacggtttttattatgattttctccgggacgagccgttttcctccgacgacctggacgcgatcgaggccaaaatgcgggagatcgccgcgtccgacacaccgatcgtccgggagatgctgccgaaggaggaagcggtccgcctgttcgaagaccgagggcagacgctcaaggtggagctgatcaaggaaaaaggcggagacgtcgtctccctgtaccgccaggacggtttcgccgacttctgcttgggaccgcatcttccctccaccggccgcctcaagcatttcaagcttctctccgtctcgggggcttactggaagggcgacgagcggggcatccagctgcagcggatttacggcacggcctttcccacggccgaggaattggagggttatcttcgtctcctggaagaggccaagaagcgtgaccaccgccgtctcggccaggagctggacctgttcggcacgaccgaggacctggggggagggctgatcctctggcatcccaagggcgcccgcatccgggcgatcatcgagcaatactggcgggagcgccactgggaggggggctacgaagtcctctatacgccccacatcggccgcgaaaacctctggcagacctcgggccatctgaatttttacaaggacagcatgtacgcgccgatggacatcgacgggcagaattactatctgaaaccgatgaactgcccgttccatatccagatctacaagtcccggatgcgctcctatcgcgacctgcctctgcggtgggcggagctcgggaccgtctaccggtacgagcggagcggaaccctccacggcctgctccgcgtccgcggattcactcaggacgatgcccacatcttctgcacgcccgatcaaatcgacggcgagattctccgggtcctggatttctccctgagcatcctctccgattttggtttcaccgacaacaagatcgagctttcggtccgggatcccaagaacgcggcgaagtactgcggcgaggatgaccgctggtgccgggccgaggcctcgttgatcaaggctttggaagcccgcggcctgccgtacgagcggatggagggggaggccgttttctacgggcccaagatcgacatcaagatcaaggacgcgctcggccgccactggcagtgcaccacgatccagttcgacttcaacatgtcggaacggttcgacatggcgttcatcggcgaggacggcaaggagcaccggccgttcatggtccaccgggccttgatgggttcgctcgagcggttcttcgggattctcatcgagcattacaacgggaatttcccgctctggctggccccgattcaggtcgaggtcattcccatcgccgagcggcacaacccctatgccgaaaagctcgtcgccgagatcgcggcccggggtcttcgggcccgggccgacctgcggcgggagaagctcggctacaagatccgcgaggccgagacgcacaagatcccccttctcctgatcgccggggacaaggaagccgcggctggaaccgcttcgcttcgggtccacggccagggggacaaggggaccgtgactcttcccgagttcctggacaaggtcaaggcgctcagcgaccgccggtcgctggcgatcgcctattaacgagagaacatcaaggaggacgcccatcttaagacgacacccaacgcttccgcccgtcaagcagagacttcatcggacgaacgaaatgatcacctgccgggaaatccgggtgatcgatgaggagaaaaagccgctcggcgtcatggccgcccacgaggcgctggccctggcccggaaccgcggtctggacctcgtcgaaatcgccccgcaagcccagcccccggtctgccggatcatggattacggcaagtttctgtacgagctgcacaagcgcgatcacgaggccaagaagcaccagaagcaggtcctgctgaaggaaatcaaattccggccgaagatctcgatccatgattacgacttcaaacttaagcacgtccagcgctttcttgaggaggggaacaaggtcaagatcacgatcatgctccgcggccgggagaaatcccggccggaaatgggcctggcggtgctggaccgggttgtcgccgattgcgccggcttgggaaagctggacggcgcattccgtagaatggactgggccgtctcgtcggttctcgtccccgccaagacaggaggaaaagatgccaaagctaaaaacccaccggggagccaagaaaagattcaaggtgaccgcggcaaagaaagttctgcacaaaaaagcgaacaaaagccacatcctgacaaagaaaaaatcgaaccgcaagcgtaatctcggtcaggttgcgctggtcgataaaaccaaccgtcgggccgtcaaggatatgatgccctacgagttctgaggagacatccatggccagagtcaagcgcggagtcaagagaaggatcaaacgggaaaaagtcctgggccaggcgaaaggctactggggcgcgaaaagctcgaactaccggacggccaaggaagccgtcgagaagtcgctgctgtacgcctaccgcgaccggcgggcgaaaaagcgggatttccggcgcctctggatcatccgggtcaaggccggggcgatggccaacggcttgacctacagccgcttcatccagggcttgagaaagatgggcagccccctggaccgcaaggtcctggcggaaatggccgtcaatgctccggaagcgttcggccggctcgtcgtccaggtcaaaaacgctcttgcctgacctcaagacattccggacggcggtcgacgccctccggacgaagctggacggggagtgcgccggagtccgcgacgcggacggcctggaggatctccgcaaccggtatctcggccggaagcggggctcggtcacccttctcttcgatcagatgaagaccctcccggccgccgataagccggccgccggtcagatgctcaacgtcctaaaaaccaaagtccaagagaagctcgcggctctcgaggagagtctccgccgtccggccacgcggggcccggagatcgatccaaccctccccggggagcggctggcttggggggcggcccatccgctccggattttccagcgggagatcgagtcgatctttgaagagatgggcttcggaatcgaggacgggccggagatcgagtccgattattataatttcgaagccctcaatttccccccgcaccatcccgcccgggacgactgggacacactttatctcggcggcgacttgctgctgcggacccacacctcgcccgttcagatccgggtcatggagaagcgcaagccgccgatccgaatcatcatcccggggaaagtctaccgccgggagacgcccgatccgacccacgcggcgatgttcttccaggtcgagggcttggtcgtagaccgggggatcaccttcgcccatctcaaggggacgctcgaacatttcctcaagcggctgttcggcgataagctggagacgcgcttccggccgagcttctttcccttcaccgagccgtcggccgaggtggacatcgaatgcctggcttgcgggcagaaggacccggcttgccgggtctgcaacgggaccggctggaaggaaatcctcggcagcgggatggtcgatcctcaggtgttcaagaacgtcaacatcgatccagagcaatactcgggctgggccttcggcatgggcgtcgagcggatcgccatgttcgcctacggcatccccgacatccggcatttctacgagaacgacctccggttcaaccggcaatttcaactcaaatgaaaatcagtctgcgctggcttcaggaatacgtcgacatcgagatgccgcggagcgagcttctcaaccggttgacgatgatcggcctcatctgcgaggaatggacggaaacgacggacggggacacggtcctcgacatcgagacctatgccaaccggcccgacaccctcggccatctcgggatcgcccgggagatttcgaccatgacgggttcccccctcaaggaacgcctccatccggtggtcgagctgccggcggcgacgtcggagcttgtcgaggtcgaggttttggacgaggatctttgcccccggtacacgggattcgtggtcaagggcttgtccgtcgggccctcgcccgacagccttcggaaaaagatcgaagccatgggggccaagccgatcaacaacatcgtcgacgcctccaatatcgtcctcttcgccaccggccatcccgtccacatgttcgacttgaacaaggtcgccgggccgcgcgtcgtggtacggcgggccaagaaaggggagactctccggaccctggacggaagggagagggccatggccccggacatgctcgtcatcgccgacgaccggcgccccatcgccgtcgcagggatcatcggcggggaggaatccggaatcacctccgccacccgggacatcttcattgaaagcgccgtcttcgacccggcctcgatccgccggacccgcaaggccctggaaatcgtgaccgacgccagctaccggttcgagcgcggcgcggacatcggcttcgcccccgaggcggcggcgatggccgcctcgctgctttgttccttcggcggacgcgtctccaagggactggtcgacctttatcgccggccgcggaagccgcgggaagtcgtgctccgctccgcccggacggccgagcttctcggcgtcgccgtccccgatgcgttcattgagaaaacgctcgccgatctcggcttttcgaccaaatccaaggctcccggatcctggctcgtcacggtcccttcgtttcgcgtcgacatcgagcgggaggcggacctgatcgaggaaatcgcccgctttttcggatacgaccgcatcccctcggtcgtcccgccgctggatgccttggaacctattccctcgaaccgggaccggatcgaccgcctctcccgccggctctttcattacggattcgatgaagtcgtcaacgccagcttcgccgacccggagaaggaggctgttctgcagacggaacggacgccggtgactctgcgcaatccgttttccgtccatgccgccgctctccggacgacgcttctcggcggcttgctgatcaatctccggcacaaccaaaaccacggaaccgaggacgtccatatttttgaaatcggcaggatcttccaccggatcgaggacgctccgcctgccgaggagcttttcctcggcctcctgagcgccgggccggtgggccttccccactggagccgtccgccctcagccgcgaatttcccccatctcaagggcgccctggaatccgccttggcggccctccgctatgaaacgcttgtctacgagccggctgaacacccggcgttcgccgaggggtcggccctggccgttctttacaagggggagaagatcggccttttagggcgtgtccgcgagtcggtctgcgcggccgccgggacgaccggaccggtcttcgccgcggaaatcgacttgggttgtctcctggaaaagaaacccgcggccttcgcttacgaaccgccgcccaaagttcccgccgttgtccgcgatctttcgtttttcgtctcccgggatatcttctaccaggagatcaagtcggccgtggaacgggccgcggtcccctacctggaatcgttcgacatcatcgaccggtacgccggcccccatcatcccgacggccggacatcgctttcgatgcggtttgtcttccggaatccccaagccacgctcctggccgaggaagcggataaatccgtccaaaaagtcttgaaagtcttgaaatcggcgttccagatcgagcttcgaaaaggagacggtgcgtgaccaatgaaatcgaccgcttgaaaatcctcgaggataaaatcaccggggtgatcgatcatatccagcgcttgtcgacagaaaacgaaaaactcaagcagctggtcaaggatctcaaagccgaaaaacgggattccgaggatcttgcccggaaagtcgtcaaacttgacggggagctcaaaaaatacgaaaatgaaagggaagaaatgaaggggaagatcgaagcgatcatttcccagatcgacaagctgggcatgtgatgagcgatatcgtcgagatcgaaatctacggacgaacgtataaaatcagagtgaaaggtgaggaaaacgaagaatatatcagccgtctgacgtcctatgtggaccaaaagatgcaggaaattgcggtgaagtcgcgatcggaggacccaacgaaaatcgccgtcctcgcggctttgaatatcgccgatgactacttcgtcagccggaagcggttggaacaagtggacgaacgcatcgaccggatggaagccgaaatcgcgaccgtggcgtcgaacctgttcaaggatgatcatgcttaacccgagcgaaaaaacgcccgccgccggacaccggcggccttggaacgtccttcggaccggccccaccccgtaagtcccccctgccggacggctcttcctcgctgcacttttgggaaggaggagagaccgtgaacattggaattctttatatcggcttggccgtcctgatcatcctggccgcgggtatccttttcattcaggtcaagcggacgtcgggggccaagaagctgttccgggccggcgaggaagcggccgggctcgtcggacaagccaagagcgaggcccagcgcctcgtctcccaagcccagaaccaagcccgccaaaagctggcctcggccgacgccgagttcgagcggatgacccaggacaagcggcgccggctcaacgaggtggagaggcgcctcgtccacaaggaggagaatctcgatcgcaagatccaggggctcgaccgccgggaccgggatatcgcgaccaaggagcggagcctccttcagaaagagcaggaaatcgagaatgaggcgaagcggatctcctcggtcatccaggaccaactggtcgagctcgaacgcatctccagcatgacccaggaggaagccaaggctcagatcatccgcaaggtcgaggacgaggcccgccttgaggcgatgcagacgctcaagcggctcgacgaggaaacgcgggccaagagccgccagctggcggccgaggtgatcagcggagcgattcaacgctcggccgccgagcacgtcgtcgagtcgacggtctccgtcgtcgatcttccgagcgaggacatgaagggccggatcatcggccgcgagggccggaacatcagggccctggaagtggccacgggcgtggacatcatcgtcgatgacactccggaagcggtcatcctttccagcttcgatccggtccgccgggaagccgcccggctggccatccagcggctcgtcctggacggccgcatccatccggcccggatcgaggaggtcgttgaaaacgtcaaagccgagctcgaggacaagatccggcaggacggagaagcggcggccatggaattgcgcatccagaacctccatcccgagctcatcaagctgatggggaagctgaaattccggacctcctacggccagaacgtcctccagcattccaaggaagtcgccttcctcagcgcagccatggcccaagagctgggcctgaacacccaaacggccctccgggccggatttctccacgacgtcggcaaggccatcgaccgcgaggtcgagggaacccacaccgagctgagcgtcgagctctgccggaagtacggcgagaatgaagcggtcgtcgcggccatcgcctcccaccaccgggacgtggatttcccctccatcgaggcggtcctggttcaggcggctgacaccctgtcggcggcccggccgggcgcccgccgggagcttctcgaaaattacatcaagaggctggaaaagctcgaaaccctggccaagggcttcgagggcgtgtccaaggcgttcgcccttcaggccggacgcgagatccggatcatggtcgacgccggcaaggtcgccgacgagcgggccgggctgatcgccaaggatatcgcggccaagatcaaaaacgagctggattaccccggacagatcaaggtgacggtcatccgggagatgcgggcggttgaatatgcccgataaatccggaaaggaaaagagcgggacggccgttttgcggccgtctttccgcgtcctgatcatcggggacgtcatcggccggtcggggagggaagccctgcgccggcacctgccggtgctccgcgaccggcatcgtccggccttcgtcgtggccaatggagagaatgcggccggcggcgtcggcttgaccgaggagaccggccgggagcttttttccatggtcgacgtcctgacgagcggcaaccatatctgggacaagaaagaaggaatcgcctacatggagaaggaatcccgggtcctccggccggcgaattatcctccgcccgccccgggccggggaagcgtggcggtcgccggccccgacgggttgaagctcggcgtcctgaatctccagggccgggtgttcatggagccgatcgatgacccgttccgggcggccgacgcggcggttgaggagctccggaaggagacgccctgcctcatcgtcgattttcacgccgaggcgacgtcggaaaaagtcgccctgggctattacttggacggccgggtttcggccgtcgtcgggacgcatactcatgttccgacggccgacgggcgcgtccttcccggcgggacggcctacgtcaccgatctcggaatggccggctcgcggaattcggtcatcggaatccgcaaggagcaggccattttgaagtttctgacgtcccgcccgattcgcttcgaaccggacaaggggggatcgtttttgtcgggcgtcgtcgtcgaaatcgaaacggccaccggccgggccctctccatcgtccaagagatcatcgccgaggattgaccggggcccggaggccaggccttggaacgaattgaatgaaccgggccgtccgtataaaatagccggggagaagcgatgtccggggaaaaagaaggccgagggctcccgcccgaggaggcgaagagcggccgggatctcgtccgggagggcagcctcgttctccgcgaccacgtctattcggtcaccgagatcacccaggtcatcaaggccgctctcgaaaccgccgtcccccaggtctgggtcgtcggcgaaatttccaactgccggcggcatccctcgggtcatatttatttcaccctcaaggacgccggagcggcgctttccgccgccgtttggaaaagcaacgccgcccgtctcaagttcgagctgcgggacggccagcaggtcgtctgccgcggccggatcgacgtctacccgccccgggggagctatcagctcaacgtcgaccaggtcgaacccaagggcaagggagccctccagctcgccttcgagcagctcaaggaaaagctccgggcggaaggattgttcgatcccgcccgcaaaaaaaagatccctttgctgccgaagacgatcggcgttgtgacctccccgaccggggccgccctgatcgatatcctccggacgatcgaccggcgcttcgccaaggtccggatcgtgatttatccggcccgagtccagggagcgggggcggcggccgaaatcgtcgaggggctggagttcctcggaggccggccgggcatcgacgtgattatcgtcggccggggcggcggatcgatcgaggacttatgggcctttaacgaggagcccgtcgcccgggcgatcgccgcctctccggtcccggtcatctcggccgtcggccacgaggtcgatttcacgatctccgatttcgtcgccgacatccgggcctccactccgacggccgccgccgaaatggtcgtggaaaaagaggagacgttcgccgagcggatcgacaatctccggcgccgggcggggcaggccgcccggttcggccttcagatgcgccgcggcggcgtcgacgagctcgcccggcacggcgtcttcgagggtttccagcgccgcctttggatgctggggcagcgcgtcgatgagctggaagggcgggcgttcgatgtggtgaacgcggaacgccggagaatcgccgacggaaaagcgcgggcggtcctggccgccgggcgcatggccgccgttctcggccggcggctcggccaggcctccggccgggcggccctggtcgaggagaggatcggcggcgcatttcgggcgttattggcgaaacggatgagcgaatgggagcgcctttcggcttcgctccaggccctaagcccgcttgatgtcttgaagaaaggctatgccgtcgtttggaaggaaggaacgccgcggattccggtcacccgggcggaaagcctccggcccggggacgcggtcgcggtctcgttccaccggggggaattcatcgccgacgtgcggacggtcgacccggtccggccggtcacggccccggacgaaagggagaggtcatcatgaaagaaaaggacaaaacgaagaagccggatctggattttgagaaggccttagccgacttggaaggggtcgtggaggagctggaaaaaggcggcctcagcctcaacgagtcgctcgcccggttcgaacggggcgtcaggctttcccggtttctccgcaatgagctggacaaagccgagaaaaaaatcgagatcctcttgaaggacgaagccggcgaggttcatcccgagcccttcagcctggaggaggccgaaagcggaaagccgccggtggccaaaccgggacccgcctcgaggaaaatccctccgaaaaccgggacggaagacgacgattccgagcttccgttctaaatcccggggaaaagagggccgcgctttgcctttccgctctctccggagaggggatcaggcctgtttgccgatctcccggcggcgggatttcatgttataataaccttttatgagaaggatgatatgcgccggatgagtggccgaaaaacgggacggaggcggatcaagggctccgcttgacctccccttcccgcgatgaaaagaatcctcgactcgatcgactccccggccgacctgaagactctgtccttggccgatatgtcccggctggccgtcgagatccgggctgagattctcgacgtcgtttcccgaaacggcggccatctgtcctcaaacttgggagtcgtcgagctcacgttggccctccaccgagtgttcgacgccccccgggatctcatcgtctgggacgtcggccaccagacctacacccataaaatcatcaccgggcggcgggaccggttcggcaccctccgccgcgaaggcgggcttctcggatttccctcgcgcgaggaaagcccctatgatccctacaacaccgggcatgcctcgacggccctctcggccgccctggggctggcggtcgcccgggacatggccggagagaaccgcctggtcatcgccgtcgtcggggacggctcgctcaccggcggggtgtcctgggaagccctcaaccagatcggcaacctgcggatcccgatgatcatcatcctcaacgacaatgagatgtcgatctctcagagcgtcggagccatctccaagtatctcggctatctggcctcgggccagcattacctccgggtcaaggacaaggccaaaacccttttgaaatccgttccgggagtgggcggggcgatcatccgggccggccgcgggctcgaggaattggtcaaaaagacgtttttcccgggactcgtgttcgaagagctcgggctgcggtacgtcggacccgtccagggccacagccttccctcgcttttggaggtgtttgaacgggccaagaaagaagccgaggggccggtgctgattcattgcgtgacccggaaaggccgcggttacactccggctcaaaacagccccgagcatttccacggggctccgccgttcgacgtcgagtccggcgagccggctttctccggaacccatccgtcctactcggaggtcttcggggaaaccctgctccgaatcgccggcgaggatgagcgggtcgtggccatcaccgcggccatgcgcgaggggaccggcttgatggaattcgccgcccggcgcccggcccagttttttgacgtgggcatcgccgagcagcacgccgtcaatttcgccgccggcctggcggccggagggcggcggccggtgtgcgccatctattcgacgtttctccagcgggcttacgaccagatttaccatgatgtctgtctccagaagctccccgtcgttttcgtccttgaccgggccggcctcgttcccgacgacggcccgacccaccagggcgtcaacgacatcgcttatctgcggcacatgccgaacatggttctcctggccccccgggacgaaaacgagatgcggcacatgttgaaagccgcgttcggctatgaccggccggtggccctccggtttcccaagggcgaaatcacgggcgcggttcccgaaccgggctggaaagacatccctctcggaaaggcggagatactcaaagacggggagaatctcgtcctggcctatggaagcatggttctgccggccctggaggcggccgaacgggccgaaaaggaatcagccgccgcgggagcagggctcagtctctccgtcgccgacgcgagattttgcgcgcccttggacgaagaattgatcctccggttcgcccgttccggccgggcgatcgcgaccgtcgaggagggcgtactggccggcggctttggaagcgccgttctggaattgatcaaccgccgcgggctttacggcgtcccgatccggtgtttcggtcttccggtcgagacgttccccgtggggaagctcggccagctccgccgccggtacgggcttgacgccgacggcttggcggccggcttccggtcttttttcagccggctggcgaaaacggaggacggcggaccgacgtcctgaacggcccggaggggcgccctcccctcgtgaaaatcatgaaaaaagcgcgcgccgatgcgctcctggtggaacgcggcttggcggattccgtcgccaaggcccgggccttaatcatggccggccgggtcgcctcggcgggccgccagatcgaaaaggccggcgagccgctggctggcgacgtccccctctccctcaaggccggccggccgtatgtcggccgcggcggcttgaagctggccgaggcgctggacgccttccgtgtttccccgagcgggcttgtctgcgccgacatcggggtttccaccggcggtttcaccgactgtcttctccagcgcggagcgctccgggtttatgccgtggacgtgtcggtccggcaaatcgacgatcgcctgcgccgggaccggcgcgtcgccttgatcgagaaaaacgcccggctcctccaaccgggggatttccccgagccggtcgggctggttgtcatggacgtctccttcatttcgattctcaagatccttccggccttggccgccgtcttgaggagcggccgggagacggccggaggggaggagccgattcttctttccttgatcaagccccaattcgaggcggacaggagaagcgtcggccgaggcggcgtcatccggaatccggagatccatgaccgggtgctgcggcgcgtggccgcgggcgcccgggcggcggggttcttcctttcgggactcatccgcttgaacacccgcggacagaaaggcaacgtggaatttttcgggcggttcggcttgagcgccccggcggtggaaccgctcccgggccgcgtgttagaatggatttccgcggccgtcaaggaagcggatcctgatccgggaggaaatgaaggatgaagaccgttcggcgcgccggcatcgtcatcaagccccacgctccgggagtggccgaggtgatcgccggcctgaccgccgctctcgaggctcgggggatcacgcccgtgctggagcgggccgcggccgaaaaagtcggccgagccgacggtctggcgcgcgaaagcattccagccgcttgcgacttggtcgtggtcctgggaggggacgggacgtttctcagcgtcgcccactccgccgcccgggcggatgtcccggtcatgggcgtcaacttggggagcctcggttttctgacggaaatccccctggcggaaatgaccctcgccctggatgccgttctttcgggacggacggacatcatcagcccgcggatgatgctctccacgacgttccgggaaaaaacggagctgaccctcaacgacatcgtcttcaataaggcggccaaggcccggatgatccattacgtcctctcggtcaacggtttggaaatcgccgctctccgggccgacggcctggtggtggccacgccgaccggcagcacggcttactcgctttcggccggcgggccgatcctccagccgagcgtgccggcgatcctcctgacgccgatctgcccccatacgctttcgttccggccgacggtcgtttcctccgattccgtcatccggatcgaggtccgcacgcccggcgaggaagtgtacctgactctggacggccagcggggcggggagatggacagcgaaggcatcgtcgaaatccggaaggcagatcacgtcctccggctggtgacgtcgccgcagcgaagatatttcggccttcttcaggagaagctccggtggggctgaaggccctccttccggcgaaaaccgggggatccggcgcggcaacggatcttgccggaaggagcgggcgatgatgaaccctctcctccggaggaagccgagcgtcgttttggtctcggccgaggcttttcccttcgccggcacccgggcttccgcggccgggatgcaggctcttcccgaatccctggcccgcctgggattcgatgtctgtctggtgactccaaaataccgccggccgacgatcgaagcgcttccgctcaccccggtcctccggcgttttctcgttccggtcgggaaggacaaagtcccggcttcagccttccgggccgaaacggccatttcgcccttgccgcccgtggatttttccgcggtgccggaccccccggcccgccgcttccgggcgtatttcatcgacaacgtcaagtatttcgaccgcgagcggattttcggctcggagaaggcgccgtacctcgacaacgacgaacggttcgccttcttctgccgggccgtcgtcgaattcctccgccgggcccggatccggatcgacatcctccattgccatgactggccgtccgccctgattcccctctttctccggacggcttatgatggacagcgtccgttccgcaagaccgcctccgttctgaccgttcatgatccggcgttccaaggagattttccgcccgagtcgtttgccttgaccggcctggcttgggacctctttacgccggaacgcctggctgcgggcgggcgattcaatttcctggcggccggtctgttgtatgccgacggcctctgcgccggagacgaggccgcggccgaggccgtccggacgggtgcggccggagcggagctggcggcggtgttggcgcgccgcggaacttgggacggccgcgggggcggccgggaaaaagcggccggatcggggacggaagcccggtccaaggtccgggcggaattcgcggtcccggcctcgggccgggacgtcgccgaggtctatcgccgggccctcatttcacgcaaaggagattcccatgtccgataacattccgtccgtgaccgacgccgatttcgaggcggaagtcctgcgctcctccctgcccgtgctggtcgatttttccgcggcctggtgcatgccctgcaaagccgtcggggtcatcgcggccgacttggccgtcgagatgaaagacaaaatcatcgtccgcctgatggacgtggacgccagccccaaaacgccggccaagtacggcatccggggcattccgacgctcctcctgttcaagggcggcgaactgaaggaatcgatcgtcggcgccgtctcaaaggaaaaaatcgtcggcctgattgcgaagcacttatcctgaggttgggggagaccatgaacgctgtcccgcgatccgacgtcgtcatcatcggggccggcccggccggcctgtcggccgcgatctacgcgggccgggcccggcttttgaccgtcgttttggagaaagccctgccgggagggcagatcctgatcaccgattggatcgaaaactatccgggatttcccgacggggtcgccccggcggtcctgatggagggatttgaaaaacaggccgttcacttcggagcgaaaatcgtgaccgacgaagcccgggagatcgtccccgatcgggcggggggcgagccggcggggtggatcgtccgcggggggaaggccgactatccagctcgggcggtcatcatcgccgtcggcgccaggtaccgccgcctgggactcgccgaggaggaccggctgaccggccgcggcgtgtcgtactgcgccacgtgcgacgcgccttttttccgcgaccgggccgtggccgtggtcggcggaggggacaccgctctcatggaagcggtctacttggcgaagtacgcctcccgggtccacctcatccaccggcgggaccgcctccgcgggacgaaaatcctccaggagcgcctctttgccgatcccaagatcacggtggaatggagcgccgtcatcgatcagatcctcggccgcgaccgggtcgaggggctcgtcctccgggacacgaacgacgggtcggtccgcgagctggccgtggaaggcctgttcgtctcggtcggcatggatcctcagagcgaattcgttcgggaacttctcgacctcaacgaatggaaggaaatccgggtcgacggccgcttggcgacgtcccgtcccgggatcttcgcggccggcgatgtcatcgatgccgctccgcatcaggtggccacggccgccggaaccggcgtcgccgccgccctcagcgtcgtcgaatatctttcaaagaccgggtgacgggcctccggggccgggtcatttcttgagggcggtctcgagttcggcgacccgggctttcatttttttgaattccttgacgaggtcgtagagctgaggggcgacggcccacagcttccgccagtcgcggatatcgagatgggggatgccggcgaccatggtcccggccgggacgtttttcgtgacccctgtcttagccgcgacgatgacgccgtcgccgatgtcgatgtggtccgggatcccgacttgtccgctgaggatcgcccggcgtccgatcttcgagcttccgccgatcccgacctgggccacgaggatcgcgtcctcgccgacctcgacgttgtgggcgacggtgacgagattgtcgattttcgtcccgcggcggacgatcgtggccccgagcgcggccctgtccaccgtcgaattggccccgatctcgacgtcgtcctcgatgatcactgttccgacctgggggatcttgaggtgccctccgtccgggccggggaggtagccgaagccgtctccgccgatctggacgccgttgtggaggatgatccggtcgccgaggcggacatcctcgcggagcgacacgcccgaatgaaggatgcagccggctccgacccggacgccctcgtagattgaaacgaggggatggatgatcgtgcccggaccgatctccgccccggcgccgacgaccgacatcgctccgaccgagacgccttcggccagccgggcgtccggagaaacgaaggcgccgggatggatgcccggagcgggggagcgcggggggatgatcaggccgatcgcccggaggaaggccagatgcggctgttcggcccggagaacggccttgagggggacgcgatcgagcggctcgccggccgggagaatgccggccgaggcccgggtgccctccaggagcgggcgcagccgggcttgggcgaagaaaaccaagtcggccggaccggccttatccagggtggaaacgcccgtgatctcgatggatccgtccccctcaaaaaccaatcctagaaactccgccagcttgccaacggtgattttcatcccggcctccgccttcttatgatgcctagtcaagcatgtattatacctggatgacatgcgtattacactcgagcgacggacgcgtggaggaggccgcggccacgggccgcaaggaaaggccgaaaaaggggggatgtcccttttaaattcaggcggcggcctggccggccgcgggggggcgggcgtccaggcgctcgttgacgacggcggccagctcggcgccccagagcatgatggccagggaaaacgaaagccagagaaggaaaaagatgatcgaagtcagcgttccctgaacgagcttgctgaggacgatgccgatggccgaaaaacggacgacgtagacgacgaaaagccgcttgaagacttcccagagaacggcggcgatgacggccgccaggagggccgcccgggtatggacttttcgctcggggatgaacttgtagatcacgaacaggacgaggacgctcaaggcgaggggaatcaagtactggatgaaaacgttgtcgaagaaggtgacgacgcccgggttgagataggtgacgacgaagtcgcttgattcgatggccccgtgcacggccgtccagacggccgtgatcgaaagcgagacaaacaggatgacgccggtcacgaacatgatcaggtattccatcatccggttgtagacgaacgagcgctggtagttcgtccggaaaatctcgttgatgatccggatcaggttggagaacagcaggctggcggcgatcagggagccgatgatgccgacccagccgagctgattgaagctgtcggcgaccgaggacattttctcgaagaaggaggggctgaaccgggcgaaaaaatcctcggtgaagagattcaggctgcggacggcgatttccgagttgcccatgatccgggccgtgatccaggcgaagagggccaaaagcggcacggcgcacatcagggcgaaataggagatgatgatggagtattggaaacagcggtcgcggtcgaaccgccggagggtttcgccgagaatccggaaaaacggggcggccatcactcggccttatcacgggaccctccggccggcgggaagaaaccgccggtcggagggtttcccaagcaaggcttcaaatcaggcgtagttgccccacttgaccatcaggatgatgaaagccacgagcaaggcgtagatgacgagcgtttcgatcagaatcagccccagaaggagaaggaaacggatcgtcggggcgcccgccgggttgcgggagatgccctcgcaggcgctgctgatggctttggcttggcagaacgctccggccgccgcggccaaggtgatgaccgcgccggcgacgatcagcgacagcatatagagctttgatttagtgtcgggcgctccgccttcctgggccatgaggggcatccaagcgaggacggcgaaaaagatcgtgagaccgagcgttttcaaggttttcgacatgacggaactccttactgtccattatacgcgagtcgagacccctcgcctaagagaagaattgaaaacgaggttaagatcccggcgctcggggacgcgcgccggggggtgatgcgttgatgaatccgttcctctggagagaacgaggcctcttcggcgaggcgcggaacaaggagaatcttggaacggggagggctcattcgggcgggcggattcacgcgtgaacttccttgaggcgggcttcggacggggcggaggaagcgtgctcctcctcctgctcgaccgcgccggacagataaatgcaggtcagaaggacgaagacgaaggcttgaagaaacgcggtgaagatggaaagggccatgaagggaaggggaagaaaaaccgggatgatcgaggcgatgacgacgatcaggacttcctcggcgaagatgttgctgaacaaccggatggacagggagacgacccgggaaaaatggctgatcaactcgatcgggatcatcagcggggcgatggccgggatggggcccatgaaatgcttgagatatttgaagaatccctgggtcttgatcccctgggcgtggtagtaaacgaacacgaacagggcgcagccgatggtgacgttgagcttggccgtgggcgacatgaggcccggaatcagccccaggaggttgccgcagaggatgaacagcccgactgtcccgataacgggagtgtatttccgcccctccgggccgacgatctcgacgatctgcccctcgaagaatcggatgatcgattcggtgacgacctggaagcggccggggacgagatcgcgcttcttcccggccaaggtgaagaaaacgatcatcgccgcggcgacgatgaaaaccatgacgatgtaatcggggatgcagcgggcgggatcggcgactttgatcccgagcaagccgaggatcgcggccaccggacgtccgaggatccggttgaccaggacgacgattccgagggggtgttctagtccttccatgtcttcatgagggcgtacgcccggaaagcctcgacgacaaaagccgggacggccatcgagaatcccgcggcgaaggccagaattttatccgggtaagcgaggattataaggaaaaaaatccccaaaatcaaaacgaagcggagggcgtagaaaaacaagccggagcggacggcggccgctttttttcggttcagaattccggcgacggttcttttcatccagagaaaagacagggtcgacagggcgccgccggccaggaagagacctcccgccgtcgcgttgaagaccgccgccgaaacgacggcgccgacggccgtgagaaccaggatttcgaggggaatgcggcggaccgccgcttcattgatcgaccgggccggcgaaccggccggagggccggccgatcgagaggacggcggagccaaagcgggatcggatcgttcaaggctcatcggattcggcctcgccgcttattctagcacagggagagggcctagtcttccttttccgagtcgccctcccgcaggaacttcttgattccctggacgaggctgatcagtccggaggcgatgcccagcaacgtccagaggatgatcatccaaggttccgttttcagccatttgtccagccaataaccgaagaacatcccgacggcgatccccgacggaagcgacaagcccagggaggcggcttcagcgagccggcggtatttgatcggcttcatcgccttcccgccggagaaccggccctcggtgtgctccggccccggctcatgatttcaagaggatgtcgacgatgcgccgcgaggcgggggccgccgatttcgggccccggccgtaaagcggggccgatttttcgggaatcgtgaaattctccgccgcccgaatgatctttttcgtatccgtcccggccaagacgttccagcccgaggcgaccgtctccacccattccgtccggtcccggagagtgatgcacgggaccttgagccagtaggcttccttctgcacgccgcccgagtcggtcaagatcatctccgctccgctttccagccgggccatttcgagataaccgacagggtcgataaatcggatccccgcgccggccgtcgtcttcgcccttcgcgccccgcttttttcggggccttttgcttccggcttccaaccggcggccgcgatcatcttctttgtcctcggatggacaggaaacacgacgggccggatgcggccaatcgcctcgagggccttaagaatatttctaagccgggccgggtcgtccgtattttccgcccggtggacggtcgccagaacgtatccgtattccccgcttccgggcttctcctccgcctcccgcatggatcggacgaccgcgtattccaatgcttccgccatgacgtcccccacaatggacacgccgtcacggatgccttccttgcggaggttggcggctgcgtttcttgaggggcagaacaacgccgtcgacagttgatcggcgacgatccggttgatttcctcgggcatccggcggtcgtaagagcggaggccggcttcgacgtgggcgatcggaaggcgcattttggccgcggccagcgccccggccagggtggaattcgtgtcgccataaatgagaacccaatccggccgctccttctccaggacccgttcgatagcggcgagcatcgcccccgtctggacgccgtgcgaagccgatccgacgcccagattgtaattgggggcggagatgcccagctcctcgaagaagatatccgacatgttgccgtcgtaatgctggccggtgtgaacgaggatttccgcgatgtcccggccggcggcggccgcttctcggatcgcccggctgacgggcgcggccttgacaaactggggacgggccccgacgatcgaagcgattttcatcggctcattcctcgccggcgacgtcgcggacgcgcccgttttcgaggcggtaccgacgtccggagcggggacaggcggcgaatcccgcggcgtcgaagcgcagcttctctccggcctcgctcatccagccggcgatccgggccggattgccgacgacgagggcgaaatcgggaacgtccctcgtcaccaccgctccggccccgacgaaggcgtgccggccgatcgtatggccgcagacgatcgtcgcgttggctccgagcgaggcgccctccttgacgagcgtgggctggtagtgctccgggccgggccggggatatttgctccgcgggacggcgacgttggtgaacaccaaggacggcccgcagaagacgtaatcctcgaggatgacgcccgaatagaccgagacgttgttctggatcttgacgaaatcgccgaccgtcgcgttctcgccgatgttgacgttctgcccgaggacgcagtgctttccgattcgggcgccggtttgaacgtgggaaaaatgccagatcttcgttccggcaccgatcgtcgccccgggatcgacgaccgaagtcggatgaacgaaatagggtgtttcggcgggcgctttccccggatcggcctttcccatgatgaaaatataccagaaacacggcccctcctcaattcatgccggccggggaatcaatacgttgtaagtccgggagcgatcgtttatcataaagcccgactttccaaggaaaaggtttgaatgaaaccgtttttactgctggccgagctcgtccccgcccagggggacgacgtccggccgatcgaatgttttcttcgggattacgccggccgaaaatctgaaatcccctccggcttccgtttggcgggcgtcgctcttccgcagaatccgcggggcattcccatgcttgatccggccgacatcttttcgatcatcgcggccaaggggccgtcgggccggggactgtgggatgatctcgacgtcgttccccatgtcaccggaaaggaacagaacgccgaggccctccggtccgccctgacgggcttccgggccatgggcctgacaacggtcctggcgatcaccggcgacaagccggcgtccggaaagcgggtcttcgagctggactccatcggcctgctcgagctcgtctccgagctgaatttcgacgcgtttcagcgagctccggtctcccctccggcgaagcggacggttccgtccccggagaatccgcccgcccccggcggcttctcgagaatcggggagatgctggccggcccgcgcccaggttcggcctccttcgcctccagattttcctcggtccctcaatttttcgccctggccgcggtttctccgttcaagtacaccgaggcctcgctccttcagcaatatttcaaagcggccaaaaaactccaggccggcgctcaagcctttcttctgcagatgggctgggactcccgcaagtccgaggagctctttcggtatttccgccaagcccgcctcgacgcgcccgtcctcggcaatgtctattatctctccaacgccaacccggccgcccggctgatgaacgagggccggatgcccggctgcttcgtttccgacgagctcctggccgccgtccggcgggagaaagcggaggctcatctcgagcgggccgcctgtcaggtcgcgatgtaccgcgatctcggagccgccggcgtcgatctcggcggtttgcccgatttcgacgccctggtccggatcgccgttcgggccggcgagatcggtccgggctggcgccaacgccggatcatcttggattatccgccgcccccgcccgcttccgggccgggattgttctacctctacggaccggagacggagggaggttccgccccaaggccgccgttccggccgtccccgcggccccggacgttccgccagcggcggttcgattttcttcaccggaacttcttgacgaagggaaagcgcctctgtccggcggtcgccgggaccgcccgggccttcggactcgaaaaaggggaggggagcctttaccggtggtttcacggagcggaagcggcggccaaggccgttcttttcgcctgcgaggactgcggagactgcttcctgccggaaaacttcggctattgcacgctcggggaatgcgccaaggggctgcccaatcctccctgcggcgacgccacgccggaaggccgctgcggaaacgacgagacgcgcgtctgcgtggccgagccgatcttccaagcggccgccgcggctggaaagctcgacggcttggcggaaaccgcgcttcccccgcggatcgccgccctcgagcacacctccggcgttctgaattatgtgtttgaccgcgaccacgcccggggctttccgctgatccaaatcgccgagctgctccacgccagcatcccccggacggcggcggccgtccaggaggtgatcaaggagggcctcatcggcgccccgcccggggccgtccgggcgtccggctccgccgccctcgggtatctcgtttcgctcatccggcggcaggccaagcagggggcggcctatatcgacgtcaacgtcgatgccctcagcgaggatgatccggaattccggaaggagatcctgcgctttttcgtccgcctgatccgcggacactccttgggcgtcccggtctgcatcgacagcggctcgacggaaatgctggaggcgggcttggccgcctggtacgagggcgggcgggaaggcggccggccgtcggccgccccgctcgtcaactccgtcaaaacctacacgatggagcggctgctcccgctgcgcgcccgcttccccttcaagttcatcggtctcctcgtagacgagaaaacggccggtctcgacggcgcctacggcgttgaggagcttcaagcgctggcccggcggatcgtccgggccgcgaccggatcgcacggattcgccccgggcgacatctttctggattcgaccgtcttccccctctcgatcgacgtcccgatggaggcggccaaaccgggctatacgttccgggcgttcgagacgatccggaggctcaaggccgatcccgagttcagggggattcatttttccctgggcgtgaccaacgccgtccgcgacttgcccggccgccggacgggcgtcacccgcgcctacctggcccgggccatggagctcggcctggacgcggcgatcgtcaacgtctttcacggctacggccggcgtccgcccgcccccgacctcctggccttcgtcgacgcgttcgcccgccaggacggctcgccggaagcggtggaaaacgccctccaggcgatgatggatttttgccgggccaaccggaaaaaataatccacgggcgcctgcctgtccagggttcgagttgagctccggtttctttttcgatatgattttctccggagcccggagacggaaggagaagccgtcgatgcaggaattcatcccctcgctcaagcgattcgccctgatcggggccgccggctatatcgccccccggcacttgaaggcgatcaaggacaccggcaacgtcctcgtcgcggcgatggacaaatccgactccgtcggcgtgctcgattcctattttcccggggcgtcttttttcaccgagttcgagcgtttcgatcgtttcctggaaaaactccggcgggcggatccggccggagggatcgattgcctgagcatcgccacgcccaattacctccatgacgcccacatccggtttgctctccgcctgggcgcctcggcgatctgcgaaaagcccgtcgtcttgaatccttggaacctcgacgccttgaaagccatcgaggccgagtacggccggaaggtgtataccgtcctccaaatgcggctccacccggcccttcgggcgctgaagtcgcgggtcgagaccggcccggccgggcgggtttacgacgtcgagctgaccaatgtcacggcccgcggccgctggtatttctattcctggaaaggggatgagacgaaatcagggggagtcgcgaccaacatcggcatccatttcttcgatgtcctgacgtggatcttcggggaggcggtcgccggcggcaatatcgttcacttgaaggagccggacagggcggccggcttcctggagctccgccgggcccggatccggtggtatctctcgctccgggccggggacgttcccgccgccggccgcgcgcggagcccgcgggcgttccgccggatcacggtcgacggggagcccgcggacttcaccgagggctgcgcggaccttcattcccgcgtttacgaggagatcctcgccggccgcggcttcggcctcgaggaaaaccgccgggcggtcgagatcgtccacgacatccggcaggccgccgtcgatccccgccggggcgaacgccacccgctcctctgattcagggccaggcatcccccgtcgtggcggaatcgaagccgcttccgttgtgctacaatataaggcttgggcggtcccatgcaattgccaggaaggaaaataatggcgggccggcggagcatttttactgtttccgccctggccggaattgtgattttccttgccgccctggccgggtccgcggccgagacttcggcccaatcccggccgcagaccgggtctcaggccgttccgccccaggcggccgcgccgtccccggccgaaaccgctgtcggcaagctcgtcatcaaggcggactacaaggaacggctcgacaacaaaatcaccgcctccggaaacgtggagatccgttatggcgagatcattctctgcgccgaccaggtcgtctatgacgagacgaccaaggacgccctggccgtcggccacgtcaccctgatccggcccgacgagacgttctcggccgaccggttcgccttgaacatggaaaccggcctgggccgggccgaaaacgtcgtcgggctcgttcaacccgaatatcggtacgagtccgaccgggtcgagcgcgaaagccccgacctgttccgggtggggaaaagcacgatcaccggctgctcccagcccgtcccccgctggaagttctccgcctcccgggccgaattcgtgcggaacgaatacattaagatgtgggatccggtcttcaagatcaaggacgttccgatcttctatcttccctacctcaaatatccccttgaccgggaccgggccacgggctttctcttcccccggatcggttattcgaaacagaaaggcttgaacctgacccagcagttctattgggccatggcccggaatatggacgccaccttttccctggattattacgcggccaagggcgccggcgggggcctcgaattccgctacctgttcgagggcggatggggcggccgcctcaacgccttctatttcggctaccggactccgtcgacgggcgtcaagccggaagatgccgtcatctttcgctggagccacaaccagcctcttcccggaaagctcaacatcgtcgccaacgtcgactaccagaactccttctccttcacccgggagttcgacaacgacttcacccgggccctggtttacaaccggagctcccaggtctacgtgacgaaaagctggaccggatcgaatttgagcgtccgcctcagccggttcgagacgacctaccccgcctggacgttcgcccggatccgccaatcccttccgcaaatcagcttcagcctgttcaagaaaaagctctgggggccgagctatttttccttgagcgccggctacgacaactggcagtatggattcaccaaccagttcaaggcgggcacccaggtgaaatcgagcgtcctgtccctttcgccgaggatcaccctgcccttcaccgagatcgcttggctcggttttgatttctccgtcgccggcaacctcgattattacggaaacagccgcgatccggagagccatgaaaccctcaaccgggggctcctaagcggaaacggatccttctcggcgacgatgaccggcccggtcttgtaccggattttcgacatccggaagtcttcgacccggttgaaacacgtcatcgagccgacgatcacgtaccggtacgacacgccggccatcgactccgaccggatcatcacgacgagcggctttttcttccgataccactatgtcaactacggggtgcagaaccagatcctggtcaagcggggcgaggagagggcccgcgagttgctgacctggcagctggagcagacttactatgtggacgccgcaaacagccccttgagccggtaccggctcgaggacgggagtatcccgcggttctcggaaatcctcaacaagctccgcttcttcccggtctccggcgtcaacctggacctcagcctgggatacaacacttataaaagattcctgtccagcgttcgggcttcagccggtcttggaaacgcctccgacggcgcttacctggccgtttcctggtacaaaagcatcaatccctatcgcggctacacgagcatcagccgccatcagatcgggcttcggggaggggcggagttccccgccctccgcctggagacgctcggcgagtttgaatacaacctccaggcgaaaaaggtgctctacgcgggcctggccgccgtctggcatgtccaatgcatcgacatccagatgggcctccgggcgtttttctttcgggaaacgccggacatccaatttctgttctccctggggctgggcaacatcgggccgtccgaggatatcctcggacgcagggggcggtgaaaaatcaaatgaagtcaattgttttttcgcgttatttttcctatgatgtttttgtgatcaggcgaggggatatccggccggctttccgtcgtcgcccggcgtccttcctccgtcgttgaatcgatgtccgtccatgaggtctcccaagcccatcggcggtagcctgtatccgaagtcgatggagagaaaacgattcctattggagcccggtatgtcgcagaaaacgaggattgaggattccgtgtccgggatgaacgtcttgtatctggggacgggtttcgtcggggcttgttcagccgccgtctcggccgacagcggccactccaccctggcttatgacgtggacgcgaaaaaaatcgccaagctccgctccggagaccgcgatcagatcgaatcgtgcatttatgaggaaggcctcggcgatctgctcgtccggaaccgggaccggattgaattcacgtccgattactccaaggtcgagaaattcctggaccgctgcgacgccgttttcatgtgccttccgacgccggaaatcaatgaaacgggcgagagcgatctcacgtactacctggaggccgcccggaaaatcgcggccgccctccgccgccggaacaaaggcgcccaggaaaagtatatcgtcatcgtcaacaagagcaccgtcccgatcgacacggtcagccgaacccggaagatcctccgggaggccggggttcgtaacaccggggttgtatccaaccccgaattcctcgtcgagggccaggccgtcatgggggcgctccggccggaccggatcgtgatcggggccgagaaggaaaaggatttcgccgtcctgcgccgcatttaccagcggtttctgaacgccccgacggtccggtacatcgaggtcaacccccgggaggcggcggccggcaagctgctggccaatttcactcttttcagccgcttggccgtttgtttcgacgtgatcggccggacgtgcgaatcgttccccggcattcatttcgaaaacgtccggagaatcctctcgagcgatccccggatcggcgcttggggcctttacgacagcctgtacgccggggggagctgcttcatcaaggacgcccgctcgctccgttaccagcttcaagcccggaagaaagacgcctcccttgtccaggagattttcggggctaaccgccgccagctcctgggattcctcaaccgggccgaaaccgaggcccgcttcgactggacgcgcaagaaagtcgcccttctcggcgtcgccttcaagcggaatacgaacgacatccgcaattccccggccttcgatatcgtcccgttcctcgccgggaaaaaagtccgggaaacacggattttcgacccggcggccatggacaattttcggcggctgttccctccctcgcccgccctcgtttatgcctcctcggaggcggaggccgtggccggggcggacgcggtgatcatcgccaccgactggccccaattccgcggtttggacgagcttctgaaaaagcataaaaaacggccgctcctcatggacggacggcggatgctccagagcgcttacggccccttgcgcaaagcggggtttaaaatcatcgccgtcggctctccgacggcctgatccgtcttccttccctccgcccggcgcttcgttcggagagagcttgattcccaaagccgtttagtccacactaggggcaaggaaggactttgtgagggaggaagagcatgaaaagggaagggttgcttgcctgcagcgtcctgatcggcagcctgcttatcccgtcttgccggaaagcccaagatgcccccgcgccaccggccgcggcggtgattgcggaaatcaacgaaaccgcggtttcggaggcgacgggcgtgaagattagggttctgaagacggaatcggtcggggtctcgccggtcaaccggttctactggatccaggtcgaggggcggccgttgagggacaagcttctggaaatctcgaggctcgccttggatcaaatcatcgccgcgcatccgaagctgtatcacagcttcacctttcatttcgcttccgcggatgaatcgaggggagcggcggatttgaagaaatgctacgcccgaacgacattcctgccggagggcaactggcagaaagtcggccgtgtccccatcgacggttacgatgcgtatgtcctggcctatgaggccgaggatatccgccagcgttgatcctttttccaagctcgtaatcgataaaaaaatctgatgtaaaggacggcttgatgccccagcaagatcaaaaagcttttgaaggagttgatttgacggaatacatcctcgtttcttggaaacaccgctggcggattctgatcgcgacggcggccctcgccgtggcggccggaatcctgtcctatttccttcccaaggcctgggaggtggaagcgatcgtcgtcccgagcaaattcctcgcccaaacggaaaccggcgagttcaaggaaatcctggcggtcaatcccgggcaggtggcgagtcaaatcagcgagggttcctataacgccctgatcgccgccgaaatgaacatcgattacaagaaattcccgagattgaaatccgataacatccggaacacgaaccttgtccgggtttccatccgcgtccgggagccgcagaaaggacgggagattcttttcgccctcttcaaccatttgaaaagcgagttcgacaagaaaatcgatgtcgaattcagcaacatcaacaaccaaatcgaccaaaccaaaaacaagatcctcgattatgagctccggatcgaatcaaaaaaaatcgagaaggaaaagatccgccagaacattgccgcggacgaaaacaaaaaagccatttccggacgccgtgtcgccggcatccaggacgagatgaggtcggtgagaacgcgcatcgccgagttggacgaacttcagcggaaaacgctggccgaaaagaagaacggaacagagacgctcgctcttcttctctattccaacgaagtccagcaaaacatccggtacatgaccgttctcgaggacaaggtcagctcggagaaagtgaacatcgaggacttgacgaatgcgatcaaaaacaacgaacagcttatgcgacaggtcgacaaccagatcgaacagatccagatcgagctgaataacgcgaaaaacgacatcgagcttctcgaagacaagaaaaaccggatcgattattcccagctggtcaaggatccgtcgccttcggtcaagcccgtctctccgcgaaagaccatgatggttatcgtcgcggccttcatcggattctgtctttcctcggggatcgctttcttccgcgaccaggccagagcccgagataaatcaaatccatcgacggattgacgatttgaacgttgaaaacagcgggatgaagaacgaaagggaggctgacgccgttctctgacgacccgcgctttcaagtctcgccttatgcgacagtcccatttagttctttccaacgccgcgatcatgtggatcacccgagctttcctgatcgttccccaggtcattctggtgccttacttgatccggacgatcggagagggaggatacggcctctacgccctgatctggtctttgctgatgtcggtcgttcagctcgaaatcgccctgcagcagggcgtggtcaagtacagcgcgggttttctcgcccagggacgcctggacgaggtcaaaaaaatcgtttcctcgagctttgtttattcccttctcctggcggtggtgacaagcggcgggttgttggcggcggcgatattattcatcgcgccctccagcccgatgagaaccgccctgaccgtggtcgccctcatcgttctcttcatcgttcccttgacgccgtatgtggccgtgattcaatcccggcagcgttattacgtcggcgccgtcctggacacggtctcgaaatacggcagcctcctggccatcgtggcctggtttcaactggtcaagccgtccctcgagagcgtcgtcgtcatcacggcggtgtttttattcctctcgcggacgtcccaggtcccgatcgcctatcgccttgtccccggactgcagaaccggccgcgctttttcaactggacgagcttccggctgatcgccgccttcggcggagcgacggtcctggtgaatttttccctcgccgccaattcaacgggcgtccggtggctgatgggtgggatggtctctcccagcttcgtctcgcacctggcgatcatcttgatgccggtctcggtgctggccgacatcatccggccgatgacgattaccgtcatgccgttgacgagcgcctacgaggcggtcggaaaccagccgatgctcaaggaactgctcattcgcagcatgcggtatacgacgatgttcgtcctggccggggtgatcgcggccggccttttgacgaggaacatcctgacgatctgggtcgggtcccgatacgcgtttctgacgccctatgcgttcgctttgttcgcctgcgtctccttccagctcagcacgtcctcggcccatcatatgctcaagggactgggccggctgaagaccgtcgtgctcatctacttgatcgcccttgtcctcgtgccgtttgccgcgatcctcgccctgtttcatctgacgcgggacccctatctttccgtcaccatcggcctgtgcgggggcagcctcctctgcgggtgtctcaatatcgtgtatggattaaaggccgtccaggcccgctggcgcggcgtctggatccggatcttcggccagtcgtcggcgatgacggcggccgtgttgctgccggcctgggggatcatccgcttggccgggttcgatcaattcctcggccgggcggccgtcgccgttttcagcgtccttctctatttcgccggatgttacgtcctgatcgcgacgaaggccgagcggcggcagtttctggattacggccgggtggtcggagaaaaagcggcgcagatcctgagaataaaaaagcggctcaaggcggaaaacactacggagatcccatgactccgggacggaggttacggcgtttcgatgttgtctcatgaatacaaatgcatttttgttcacatcccgaaagtggcgggcatcagcattgagcaggtttttctcgatgcgctcggcctggacttcgcccgccgggaatcgcttcttctggggatcgtcaaccggggagatcgggggcccgggatcctgtcccacctgacggcccgggaatatgtggaatatggatatgtcaaccaagaaacgttcgacgcctactttaaattcgcgttcgtccggaatccctatgaccgggtttattctttttacaagtacctgggatacgcccgtctagtctcgtttgaaacgttcattctagacgagcttcctcgtctgttcggcgatccgagtctccattacttcatcaagcccatgtcgtcctatgtgtatgatgaatcggggactcggctcgttgattacgtcgggaagctggagacgatcaacgaggatttcgcccaagtcgcccggcggttgaacctcggcggcgcgcgacttcaaaatctcaacgattcgagcggtttgagcccgggaactcatgctgttcgggcctggagaatcatcaaaaaacaccccggaatcgtctttcgcttgtcgttccgcccggcggcgaaggaaaaacggtataccggggaaatgaagaacgcggttcaaaaatattacgagccggatttcgttcattttgaatacgcgagataaatgaccgcccgtccttccgctcagcgcctgactctggccgtcgcgttcttcttcctcgtcctcagcttcgccctgtacgcgttcgccccggacgattattccctgggatattgcgcggccgtgctggcggtgttcttggcttcaacggcctggttcatcaaaaagagtcttttcggaaactattttaattttcatgtcctcttcatcatcggattttttctcgtccatttcgtctatcccgtcttcgtttatccgaaccggccgtttctcttcaaggtcttcgagaggggattcgatccctctctcatcaccgtttcgacggccctggccctcctcggcatgaacgcgtacatcctgggcgcggtgttcggcggaaaaatcaagaacgttccaccgggcggctgggacgcggagcggtaccgaccgctcgaaacgccgttgtttgtcctttccttggccctgttcgcgctcttcgtcttcttttcccgcgacaacatcgcccggggcgttttcaacgcctacagcgcggcctcggagtatctcttgatcgcgtttcaagggatcttcccgctggccctcatggtctccttcgtcggtcggctgcctcacgatgacggacgggggagaagcttgtttcgggtcttccggccgcgtctcgtcgggctgtcggtcctcgccgtttttgttttcctctatgtcggagaccgcgggccggcgattcaaatcgtcctgatctacggcgccttgttcacgacgttcctccgtcccctgaggctgatggtcttcgcgatcctcattgcggccgggatgtatctcatgatgttcgtctcgcaggcgagaacggtttatgacgacacgcgggaagacgaaagcactatcatcgcatactataaacggggagcggaacgatttgtgccggaatcggtttttgatttcgggcgggacatgatcgtcaacaaccgcaatctctatctcgccgtgagctatgttcaaaataacgagcgcacgcttgggcggacattcctgactcaaatcctcagcgtcgtccccggcttgcagagcgtgtatgttacgctttttcatgtcgatctccaggacatttcctccgggcagcttttaacgtatcatgagtacgaggggggggctcgtggcgccggcctcggcaatacgatcatcgccgacgtttatatttcgttcggagcggcgggcgtcctcgtgatgatgatgctgttcggctatgccaacatgaaattccagaggggggcgatcgacaaggtccatctctattacctcatcgcttacgtcgtttccctgtcgttttccatttattatccccgctcgggctacttcaccgccttgcgcggcatcctctggccggcggcgatcgtctggttgtttgaaaaattcgttcggaaaccggcggcggaaggaagcccgttcgcggggagcggcgcgtaagcgggaatggcatggaaaaaaatgaaaatccttcttgttagaaataatgtcatgcttgaaaaaggcaacgatttgtttatctttcgaagtgacggccgatttcttgttgaattatcccatcttgttgaacaggtaggatttttccaatttcgtattaaaaaccaggaaaaaaacagtatctttgattacaaaatcaatgaccgcgatattaaaatcatatcgatatcgagggggaaaataaaatacgccgcctatatccaagggttgattgttggatttaaaatcgtccgaaaatatgattttctctatctatattatcccggaaatatcaatctctttatggccatctttgccgtcctatggagaaaaccatttggtttttatatccggggggaaaaagggatgcggtctcgcctctcaaaaatattatttcggaaagcgatgatttctttgacaatctcgcctcaattcactgaaattatcaggaaaggaggaggcgaggcgcaaacaatacgtccgatgatggaagagggggagaaggatatcgtttccggccgcacgtatgagcgacgggatcattatcgcctcctctatgtaggccgcgtcgaagagccgaaaggctcctatgatctcgtccaagcggtgaaaatcctgaaggacaagggggaagtcgacttcagcctcgacatggtcggcgacggagcggatgcggcgaagatcaaacaaatcatcgcggaggaggaccttggcggatggatccgccttcacggggttgtctccgatcgggatttcttgaaaagaatgtaccggcaagccgacctcttcgttctcccgacgcaccatgagggctttccgcgggtcctgtatgaagccatgatcgccggaactccgatcctcacgacgttcgtcggaacgatcccgtatttgatgaaagatgggtataattgctaccggatcttgcgaaaaaatccggagcatattgcaaaaacgatcctgagtgttttgcaggactacgataataaatccagcatcgcggaaaaaggaacaaagacgatcatcgcttatttatgcgataaaaaggaacggcacgcaaaacaattagtgagaatccttgaagaaaaaggaatgaaataaacgtgacgcgccgtagtattaaatggcggcattcacgcgaagatgatccggatttcaaggcctcttttgaaaaagtgattatggaaatatccctttcttcggacgacaactgtttgggacaaagccgaaacgtcgaaaaacaatatttcataaaccataaggaatctgtccggcagaatgtcctcatgatccaaaaaggcctgaggatattgcccaaagggaaggaatcggcgattcttgatattgggacttcgccgatgacgtttgtttatcgaaagtgttttccaaatgtacggatgttcacgattgatctcacttcgctcctagcggatcgatgtcataaaaatcgaatagagcattgcgtgtgtgaccttttaaaagatgaaatcccgttttctcccggtcagatggacatggtcgtttttacggaggtttttgaacatttgaatacaggcccgggaaaagtgttttcggaaataaaaaaaattcttagagcgggagggattctggtcttttctcttccaaatatcgcgatgctcagcaagcgcatcaaagcgattatggggaaggcggtgctcgatccggtgtatcgagtgtacaaagaggaaaagtcggcgtcttcacatggggacggaatctgggtccacggtttcggtcatgtgcgggagtacacgatggccgagacaatcgatattgtccatcactatggatttaatgttttaatgacacgctctgcggatacgcatatctctctgccgaaaggcgcgtcgattcttcgacatgtgatgaatcctctttatcgtgtggcctcgtcgattgttcccaattccgggatgattaatatcgttttggcgaagaagcgctaatttcttttgatagggtctcccgaaaaaacatcaaatcggcggatgcgatggcttggccggataagaaatgcttggactttttaagggattcgatcagattcacgggcggttgacgcctaaagtcagcgtcatcatccctttttacgccggggcgggctggctggaggaagcggtcggaagcgccgtccgccagacatatgaaaacacggagatcatcctcgtcaatgacggctcgccggaggatgtgggaggtgtccttggccgcttcgccggaaaaatccgctatttccacaaggacaacggcggtcccggctcagcgagaaatctcggaatcgagaactccgccggggagttcatcgcgttcctcgattcggatgatgtctgggaggaacggaaaatcgagaaacaactcggcctcatgacggcgacgggcgcggcgtggtcgcataccggttatacgcttttccgcggcggaaatcctcgccgggccgagaaaacggtcgatgtctcggcctgccgcggggatgtctttctccgatgccttcgatcggcccccatcgccacgccctgcgtcatgatccgggccgagatcctgagagaaagcccgaatctgcgcttttcggaaaaaatgcgctacggccaagacagtcttttctggatcaacctggcggcccgatatccgctggcggcggttcccgaagtcctgacccgggtccggatccggggggggaacgcggcccggcgggcccgcgtccaactccaagccaaggcccagatttgggaggagttcatccgggaccgggcgcgtccggaggcggaaagaatcgatggcgcgacgaggttgggctaccggatgtgccatcgggccgacgcggccgtcaagcgcctcgagcagcggggccggcttccgaagcgggccgtcgagatcctttcgcgcggcctttacgccgctccttacgtcctgctcaagctgcgcgaggttctttccgcccgcgcggatcgccgccgaacgccttgacttcatccgggaggaggcataatttgaatccaatcgctgtgatgaaaaacgccctcagggggaaatgatccgcccatgtttaaaaacaaggttctcctcatcaccggcggaacggggacgttcggcaatgccgtcctcggccgcttcctcaagaccgacatccgggagatccgcgttttctcccgggacgagaagaaacaggaggacatgcggctggcctacaagagccccaagctcaagttcatcatcggcgatgtccgccaggccgacagcctcgcgccggccatggccggcgtcgatctcgtctttcacgcggcggccctcaagcaggttccgtcctgcgagttttatcccatggaggcgatccggaccaatgccttgggcgcggaaaatgtcatgaacaccgcggccgaagccggggcctcgagcgtcatcgtcctctcgaccgacaagtccgtctacccgatcaacgccatgggattgtccaaggccctgatggaaaagctcatggtcgccaaggcccgcctgggcgggaacgaaaagaccgttttctgcgggacacggtacggcaacgtcatggcctcgcgcggatcggtcatcccgcttttcatcgagcagatcaagcagggaaagccgctgacgatcaccgatccaaagatgacccggttcatgatgacgatcgacgacgccgtcgatctcgttctctatgccttcaaaaacgcccggccgggggacatcttcgtccagaaagcgccggcggcgaccatcgagacgctggcccgggcgctgctggagatcttcaaggcccggaatccccttcagattatcggcacccgccacggcgaaaagctttacgaaacgctgctgacccgggaggagctggcccgggccgaggacctcggggattactaccgcatcccggctgacaaccgaggactggattacaatctttatttcaccgaggggcaggagcgcgtttcgaaggaaaacgactataactcccacaacacccggcgtctcgacaccggcgaaatggccgatctcttgatgaagctcgccctggttcgggacgagcttgggacggaatcgaaatgaaccgggtactcgtcaccggggccgagggattcatcggaaagaatctccggctggccttgggccgcgaagccgggaccgaaatcatcggcgtcgatctcgggacggcggccgcggtcctggagcgcggccttgacgaagcggaagccgtcattcacttggccggagtcaaccggccggaaaaggaaaacgaatttgaggacggaaacgtcggctccctggcggcggtccttgcgggcctcgagcgccgcggccgccgtccgctggtcgtcctttcctcctcgatccaggccctcttggacaatccctacggccgctccaagaaacgggctgaagacgctctcctcgatttccaccgccgaaccggggcggccgtccggattttccgcctgcccggcgtcttcggcaaatggtgccggccgaattataactccgtcgtggccacgttctgccacaatatcgcccgggatctgccgatttcgatatccgatccggaccgggaaatcgatcttgtccatgtggacgacgtcgtcgccgcctttctggccgctctcaaggccggccccggccccggcggcgcgtcctttctttccgtgacgccggtcttccgcgtctctttgggggcgttggccgggaagatccaggcgttccgggccgtccgggaaaccctggcccagccggccttggacgatcctttcgaccgccggctcttcgggacgtacgtctcttaccttcccgaagaggagtttgattacgacctggcggtccgggaagacgaacggggggcgctggccgagctgctcaagctcggcggccacggccagatcttcgtttcccgaacccgtccgggagtcacccggggaaatcattatcacgactccaaggttgaaaagttcgttgttctcgaaggagaggcggtcatccgcttccgtcgcctgacgacgggcgagatcatcgaatatcccgtctgcggacgggagatgcgggtcgtggacatcccgcccggctggacccattccatcgagaatgtcgggaccgcggagatgatcgttcttttctgggccagcgagatcttcgacccggcccggcccgacacgttcgcggcaaaggtgagaaatgaaaaagcttaaggtgatgaccgtcgtcggaacgcgccccgagatcatccgcctgtcccgggtgattccggccttggaccgggaatgcgagcatgtcctcgtccataccggccagaattacgactatgagctgaaccaggtctttttcgaggacctcgagatccgcaagccgaaccgcttcctggaagcggccggggcgaccccctgcgaaacgatcgggcggatcatcgagcggatggacgccgtcctggaccgcgaccgcccggacgcgctgcttgtcctgggagacacgaacagctgcctggccgcttatccggccaagcggcggaaaatcccgattttccacatggaagcgggcaaccggtgcttcgaccagcgcgtccccgaggagatcaaccggcggatcgtcgaccacctcgccgacgtcaaccttccctacagcgcgatttcccgagagtacctcctccgcgaggggcttccgccggaccgggtcatcaagacgggcagcccgatgttcgaagtcctgcatcattaccttcccaagattaagaaatccggcgttctcgagcggctgaagctccggcccggcgagtattacgtagtcagcgcccaccgggaggaaaacgtcgattcgtccaagccgttcgatgggctgatgaaaatcctcaacggcctggccggagacggaaaaaagaaagtcgtcgtgaccacccacccccggacccgaaaaatcatcgaggcccggaaaccggccttggcccctgggataatgctggaaaagccgttcggattcacggattacgtgaagctcgagctcgaggcttgcgccgtcctttccgacagcgggacgatcaccgaggaatcctccatcctcaacttcccggccctcaacatccgggaagcccatgagcgccccgaggggatggaggaaggagcggtgatgatgaccggcttggattacgaaaacgtccgccgcggcttggccgtcctggccacccagccgcgcggcgagtgccggggaccgcggatcgtcgcggattatgacgttcccaacgtgtccgaaaaagtcctccggatcgtcctgagctacacggactatgtgaaccggacggtgtggcgcgcggccgattgatgcgcgttcttctcctgacgccgctgttccagccggagccgaaccatttgaagggtttggcctttgcccgggagttggtccgccgcggccatgacgtcgaagtgttgacgggattcccccattatcccgccgggaaagtctatcccggctaccggatccggccgtggatgcgggaaatcctcgacggcgtccccgtcacccgcgtcatgatgtatccgagccacgaccgttcggccgtccggcggacggctggatatctgagtttggccggcacggccgccctgctggggccgccgttggtcgcccgccccgacgtcgttcatgtctaccaggggccggctacgctggcctggccggcgatggtgttccggatgatgttcgggacgccgtacgtcctcgacgtccaggacatgtggccggaaagcgtgaccgtgactggaatgcttcctcttcccggcgtttcagccgttttgggggcttggagcaaggcgacctaccggctggcccggaaaatcatcgttctttcgaatggatacaaaaaatgcttggaggcccggggtgttcccgagaagaaaatcgaggtcgtctataattggtgcgacgaacggtcgcttccgggggaaacggacggggagggatccgatccgttcgggctcgccggccggttcaatgtcgtttattccggcaatttcggagcgctccaggctttgggcggcgtcttagacgccgctttcttgatcgaggaaaaacgtccggacatccgcttcgtttttgtcggagacggagtggaggaatcggccttgaagaaaaaggccgccggccgcgggcagaaaaacgtcctgttcattccccggcaggcgccggagagcctgggccggatcacggcccgggccgacgtgcttctcgtgcatctgaaggacgatcccctggcccggatggggattccccagaaaacccaagcctccttggccgcgggaaaaccggttctcctggcgatccggggaagcgcggccgagctggcggcccgggccggaggagcctggacatgccgccccgaagatccggccgccctggccgaggcggtcctggggctggcctccctttcctggaatgagcgggagacgatggggagaaaaaacgccgagttctaccggaaggagctggcgttttccatcggcgtcggccggatgacggcggtattcgaagaggcggccgtccggccgcggagaaaggaagggggacgatgactcattccgacgatcccgttattcggctggccgggcggggggacttggaggatatgacagctctccattgcgattccttcaaattcggcgagcacgtcccggccatgctcggccggcattatgtccgggcgatgtaccgctggctcgtgacgagcgcggtgtcctatgccctggtcgccgagagagaaggaaaaatcgtcgggattgtggccgtctgcgacggcccgttcacccggccgatgtttctggcctgccttcccgcgttcgccgtcagcctggtccggaggccggcgctgcttttcaatcataagctctggagccgtcttttccgccggccggatgtgacgagcgccggcagaaaaatcgccgaccagcccggattcgcccagatgacgatcggggtcgtcgacaagaattgccgcggtcggggcattttcccggctctggtcgaggagacgaaaacctacagccgaagacggggaagccgggcgattcgggcgggaatttacaagatcaaccagccgagccgcagggtttttatcaagggccgatggatcgaaacgccggaattggaaaccgaggacacggtcttctatgtcgcctatttggatgaggcctttgccggggagctcggtcttcggtcggccgcggcgagtgatgaaaagagcgtttgacctcggggcgtccgggctggggctgcttttgctttcgccggttttcctgctcgtggccgtcttgatttttctcgccgacggccggccggtccttttccgccaaacgcggatcggaagggcggggcggccgttttcgcttttcaagtttcgaacgatgatcccggcctcggaaggcgagggcggcggattcgagcccggcgattcccgccgggtgacatccttcggccggtttcttcgcaagaccaaaatcgacgagtggccccagctgttcaacgtgctgaagggggacatgtcgatggtcggtccccggcccgaggtgtcgaagtgggtggcggcctatccgcggcggtgggcggtcgtccaccgggtcaagccggggatcaccgatccggcgtccatcatctaccggaacgaggaggagctgctggcggcggcggccgatccggaagccgtctaccgaaacgagatccttccccgcaagctggatctctacgagcgatacgccgaggggccgccccgcttcggccgcgacctcggcctgatctttaaaacgatcgcggccgtcctcaagttctgaaggaaggcaggtgccggcatggctgagatgaaaatcccttacagccgcgttttgtgcgacgggaacgagttggcctacgtccgggaggtcctcgaaagcggctggctgacgacggcttccaagaccctggaattcgagaaaaagttcggggcggcggtcggggcccgccatgcctgcgccgtcaattccggcacggccgccctccacctggccctggaagcgatcggcgttgggcccggctcaaaggtcttcgtcccggcgatgacgttcaccgcttcggccgaggtcatccgttaccttaatgctgatcccgtcttcctggatgttgaatacggaacttcgcttttgacgacggagatcctggaagaagccgtccggcgcttccctgaagtgaagacggtggtggtcgtacattacggcggccaggcggcggctatgaccgttgagaaaggggcggggatcctcgacgtctgccggcggaagggaatccgcgtcgtcgaggacgcggcccatgcctttccctcgcggcgcggcggccgcctggtcggaaccttcggcgacgtcacgtgtttcagcttctacgccaacaagacgatcaccacggccgagggcgggatgctggtcacggccgacgatcgcgtcgccgcccgggcgaaagtgatgcggcttcacggcatcgaccgcgatatttggaaccgctacgtgtccgacaagccgtcctgggagtacgacgtggtcgcccccggcttcaaatacaacctgcccgacgtctccgcggccatcggcttggctcaattggagcgggccgaggcgctgcggaaagggcgcgaacgctgcgcccgctattacatggaagcgctggccggaatcccggggctcgatctgccaaagctccaggtcggattcgaggatcatgcctggcacttgtttccggtcgttctcacgccgaaagccccgctctcccgggaccggtgcgtggagcggctcgccgatcgcggcatcgggacgtccgtccattataaacccttgtaccggatgacgtattaccgggaaaggtacggtctgaatccggccgactatccgaattcggagcggatctggaacggctgcctttccctccccatctatccggacttgcggctggaggagctggcgtacatctgccggtccctgaaagagattctttccgcccggggcggggaagaggcggtttgaaatgcccgggccgaaagagtatattgtttaccgtcccctgaaaaggacgtgacgaaggaatgggaaaaagcgaaaccgcccgtttcgaatcaaaaatcgcgccggttttccggcccacggtgctcaaaaggaaggtttttttcttaaccgccgacgccgtcctgatcgccctgtccgtttatctttccttttggcttcgcttcgacggccgcatcccggcgacgttcaccaaaggcttgtgggtgaggatctgcgtcgtcgtggtcgtgacggtcacgatgatcgccctccacggcctctacaatgtcgcctggagattcttcggcctgaaggacatgctgaagctcctgcaggccgtgaccttgtcctatcttttgctgatcgtcatcatttatgcgttcaattggctggccggaatgagggaaatcccccgttcggttcttctcctcaactacaatttcaccctggtcctgctcgggatgctccggatatccaagcgcgccttgagggagtaccatttccgcaaaagaggtttgagccggggtcggaaaaaagtcctgatcgtcggggcggggacggccggagagcagatcgcccgggaaatgacgggaaaccggaaatcggcccatttcccaatcggattcgtcgacgacgacgaagcgaagcggggaacggagatccatggggtgaaagtcctgggaaaacggcaggatatcccccaaatccttcacggcaacggcgtcgacgaggttctgatcgccattccgacggtgaattcgaaggacattcggaaaatcgtcgagctggtccgctcgacgggagaagtccggagcatcaagctccttcccggcatccacgacatcgtggaggggaaagtatccctgatggacatcaaggacgtggaggtcgaggacctccttggccgggcgcccgttcaaatcaactttgagggaatccgggcgtttctcaagaacaagcgcgtgctcgtttccggggcggggggatcgatcggcggcgagctggcccggacgatcagccaattcgagccgggcgcgctgatccttctcgataacgacgagaccgagcttttctacgtcgtaaacaggctgaaaaacgccgtcgccggggtcctcccggtggtcgcgacgatccgcgatgaagccaagatcgatcggatcttcgagcagacgcggccggaaatcgttctccacgcggccgccctcaaacacgtcccgattctggagcactaccccgaggaagcggtcaagacgaatatccgggggacccggattctcggcgaagcggccatgcggtacggggcggaacggttcgtgaacatctcgaccgacaaggcgatcaacccgacgagcgtcatgggggcttcgaagcgggccggggaggaaatcctgcgggcgctgaacgcgatgggcggaacccggttcatctccgtccggttcggcaatgtcctgggaagcaggggaagcgttatcccgctgttcaaagagcagatccgtaaaggcggaccggtcaccgtcacccacgccgacatgaagcggtacttcatggctgtctcggaggcggtccttctcgtcctcgaggcggcgacggcggggaaaggcggcgaggcgttcgtcttggacatgggggagctcgtgtccatcgatgaactcgcccgggagatgatccggctgagcggattggagccggatgtcgacatcatgatcgtctacacgggactgcgggccggcgaaaagctttacgaagagctgatcatggccgaggaaggggcgatgcccacggaacaccgaaaaatcttcctggccaggaattcgaaacccttgaatgccgcccatatctggaaaagcgtggaccggctgatcgatgcctgcgaatcggggtcctgccggaaatccgagatcattcctcttttacgggaaatcgtgcccacctacgtcccgggcccggacacgagctcgatcaatcattggtgagccgcgcgtccggcggaccggaggcgcggcgaatcccccttacctctccctaactgttttccttcttttccggaggactgtttgcgggcttggccgcctcggttttttccttcggcttgatcgggccggccgcctggatgatcccgatcgccaggccgaggtcccggggatcgtccgatacgcccgccttacgcggattccacgtccgatccacctcgaacagaaaaagggaagattccgggaagccggggggggcctggagctcgatccttttccataggttttctttaaggacgaggtcttggagaaggaccggtttcgtggccaggtcggcggcggcgaagaggcgcagccggaccggccggacgcggatgtccggatgagaagcgaggagccacgccttgagcggaggagcgccggcccggccggtcagtcccgcatatcgtccgctccagcggaaacgccgtccgtccgcgtccttttcatagggaccgaggccgaatccctgccggagccggtagcgctcggtgcgggcgttgagcgagagcgaatgagctgaattccaaagaagccccgccgtgccgagaaaaaagaggattgttccgaagaggcgtcccaagcgccggctcgacggcttccgccctgccgcggcggcgggcgaagggacgtccccggcgaacgccagggagccgagaaaccagaagaggtactggatttcatagcttccgatgtaggaatgcgactgggaattcacaaggaaggcgaacaatccggcggccgaggcggcgatgagggccctggggaacgtcccggaaggcgccgcccggaacgagagaaaaatccgccttcccatctcccaaaggatccaaaggaatagaagcatgccgggaatccccagttcggacccgacgtggagaggaaggttttcggccgattcgggaactccgatcgagatcttgagggttttcgccgtgttggccatttcgatgatataggccccgaccccgacgccgcttaggggataatcccggatcatctggcccgcgatcctccagtggccggcggtgcggatttcgagggctgaggcgaaatcctccatgcgttcgatggtcgccgtgcgctgtccgttctcggaggggaaatttcccgatatcaagagatagatcgaggcgccggcgaatacggcggccgccagccccagagggatgaccaggcgggctaacggaccgcgccgctcgagaatcgccggaagcatgaggattcccaggaagagaagggcggcggcggcggcgatgagggcgctcttggagccggcgtggaacaagaaatagccggccgcggccgtcatgacggccgccgtcagcctcgtccttcccttgacggcgggcaggagtccggccaagaagggaatgagcattgagagaaaagccccgaaggacagggcgtccttgaaggtcgcgttgagaaggccgtgacggagactggccggaagattgccgagggcgggggaatgaaatttttgaataaacccgaaaccgatcgagagaaatgatccgaccccaaacgccgcgacggcttttttaatgaacccctccgtccggagaacccggacgcaaagggtgaaaaaaacgatgccggtcaggtacgtcaggctgtagaagacgacgctcatgatcgccccgccggcgctgacgcccttgacgttcgtcacaagctcataaatccgcggccgccagagggggaaaaaattcgtgtagcgccaaaacgtgatcagggcggagaaaaggacgaggccggcaaagaggcggagcggcgtgaagagaggttccttcggtccttttccgctttcttccggcggaaaagggaagaagaccccgtggatcagccggcccaggaagaaaaagagaaacaggaccaaggccgagggagccatgggaagcggatcgtagagcttgaaaaaatacgggagattgttgatcagcggaaatagaaaaagaaatcccagcaagccctttcggacgtcggtcgccgcggcgacggcgacgaaaaggagaaggggaataagaacggcctggtaagcggcgacaaggggcacatacttccaatagaaaagagccagcagcaaggaatataaaatgaccgcgagtccgcgaagaagacgtcgatggtttggattatccactcggtcgttccgccccgtttttcatgactatggacagattatgcgttttggaaaaaactgtcaatctatgttatattttcgggcgaatcccgggcaaaggacaatccgatgaggggaatcattctggccggaggcaaaggcacccgcctccatccgctgacgcattcggtcagcaagcagcttctgccggtctacgacaagccgatgatttattatcccctgtccctgctgatgctggccgggatccgggacatcctcgtgatctccgcgccggagtcgctcgaggcgttccgggctctcctcggggacgggcggcgatgggggctccggttcgagttccgggagcaaagtgagccgcggggcctggccgacgcctttctcgtcggacgcgatttcatcggcggcaagccgtcctgcctgatcctcggcgacaacatctttttcggccacggattgcccggacagctcaggaaatgcgcccggctgaagaccggcgcgatcgttttcgcctacccggtgaaggatcccgagcgctacggcgtcatcgagttagacagccggggccgggccgtcagcatcgaggagaagccggccaagccccggtcgcatttcgccgttcccgggctttatttctacgacggccgggcttcaaatttcgccgccggcctcaagccctcggcccggggcgaaatcgagatcaccgaccttaatctcgtctacctgcggcggggcgagctccgggtcgaggagatggggcggggcacggcctggctcgacgccgggacccatgaatctcttcttcaggcggccaatttcgtccaagcggtcgaggaccggcaaggcctgatgatctcctgtcccgaggaggtcgcctttcgcctgggctatatcgacgttaagagactgcgccgtttggccgaggccatcccgaacgcctacggcgagtacctgctccggttgtcccgcgagccgatgggaggaaagaagccatgattcaaggcgtgagcgtaaaaaagctccgggtcatccccgacgagcggggccggctgatggagatctttcgggccgacgacgagtgtttcgagaagttcggccaggcctacatgacgacgacctatcccggcgtcatcaaggcctggcacaagcacgagaggcaggccgacaacatggcctgcgtccacgggatggtcaaggtcgccctctgcgacgcccgggaaggctcgccgaccaagggcgagatcaaccagttttacatgggtgtccacaaccccctcctcatccatattccggccggcgtttaccatggctggatgtgcacgagcccggaagaagcgatcgtcgtcaatgtcccgaccgagccgtacaactacaaggagccggacgagcagcggctcgatccccattctggagagattccgtatgaatgggagcggaaggacggctgagacggaatccgtttgattcccgtcgttgccgtgaatcctcgtcccgtcgccggcgggatggaatccaaaacgagacccgtggagagaagaagatgaagcagacgaaacgccgtcccgtgaaaaaagccgttccgtcggccggccgccgggcgtccgggctcaaagcggctccctccgttctcgagcgcgccttgaacgggagaacgattctcgtcaccggcggagccggtttcatcggcagcaacttcatccggatgatgctggccgaataccccgggctccgcgtgatcaatctcgacaagctgacctacgccggaaacctggaaaacctggccgacgtttcatgcgatccgcgacacgaattcatccacggcgacatccgcgatgcggccctcgtcgccggttgtttcgagcgcgtccagggcgtcgtccacttcgctgccgaaacccacgtcgaccggtcgatcgtcgacgcgggggaatttgtcctgacggacgttttcgggacgtatattttgcttgaagccctgcgcaaagcgcccggcgtcgaattcttcgtccacatctcgaccgatgaggtctacggcagccgggagaaaggctttttccgggagacggattctttgaatccctcctcgccctacgctgccagcaaggtcggagccgaccggatggtccaggcctatcacacgacgtacggcgcgccgacgatcatcctccgcccgagcaacaactacggtccgtatcagcatcccgaaaaattcatcccgctgttcaccacccacgccttggagggacgaacgctgcccctgtacgggaagggccggaacgtccgcgactggctgcacgtcgaggacaactgccgggcgatcgaatgcctcatccggcggggccggctcggggaggtctacaacgtcggagccaacgacgagcggacgaacatcgaggtcgcccggaggatcgtcaagctcacgggggcttccaagaacctgatcaagttcgttcccgaccggcttgggcacgacacccggtatgccgtcaacatcaataaaatcaaggctttgggatggaagcggaaggtcgatttcgaggaagggctcgaggcgaccgtgcggtggtacatggataaccgggcctggtggacgaggatcaaggaaaaaaacgccgccttcaaatccttctacgagagctattataaagaccggaaataagtcggcggatttgatataattccaggcgggtcgatccatgtgcggcgttatcggtatctgggccaacggacaggtcttccgggacctttaccagggattgctggcgatccagcaccggggccaggacgcggccgggatcatcacctatgacggccgttttcacaccaagaagggcaacgggctggtccgcgacatcttcaaagccgcccacgccgagcggctgaccggggccatcggaatcggccacacccgctacccgacgatcggcggcggccggggcgaggacgcccaacccttccagctgaacgcccccttcggcctcatgatggcccataacggcaacgtcgtgaattacgtcgcccttaaaaagcaccttgccgagaggcaccatcgcctcctcaattcggacaatgacgtcgagagcatcctgaacgtgttcgccgtcgccctggaagcccagaatcccgattccttgacccctgagatcgtctttcgggccgtcgagtccgtctttcgacaggtcatcggcggctactccgtcgtcgcctacatcgccggccaggggatggcggccttccgcgatcccttcgggatcaagccgctgtcctggggccagcgccgcgacggcgtcgtcccgtcctacgcgatcgcctcggagagcgtgtctctcaacatcatgaatttcagcgacatccgcgatattcctcccggctcggcgatcttcttcgatcacaaccgggaaatccacatgaagcggatctgggacaagccccattcgccctgcttgttcgaatgggtttacttcgcccggcccgattcgatcatcgacggcgtcaatgtttaccgggcccgcgtccacctcggcgagctcctggccgaggagatccgtaaagccgggctgccgatcgacatcgtcgtcccgatccccgactcggcccgggacgcggccatcgagatcgcccgaaagctcaacctgaaataccgcgaggccctggtgaagaaccgctacatcggccggacgttcatcatgcccgccgtcaacgatcggcagaacatggttcggttcaagctcaatccgatcgccgcggaattcaaggaccgcaacgtcctattggtcgacgacagcattgtccggggcaacaccgcccgggccatcgtcggtcttgtccgggactgcggagcccggaacgtctatttcgcctcctgctccccgccgcttcgctatccctgcgtctacggcgtcgacatgcagacccggaaggagttcgtcgcccgcgaccgcaacgaggaggaggtcgccctccggatcggggcggaccgggtcatctatcaaacgcaggagaacctggtcaaggccattcggatggaaaatccgaacctcggccggttctgcgcggcctgtttcgacggaaattacatcacgggggacgtcacgcccgaaatgcttcaatcgatcgaagaccagcgccggaaggcgtcttccggccagatggagttgaacatcacatgaacattctgatcacgggaatcaccggtttcgcgggcagccacttggccgagtacatcctggcccatcatcccggcgtcaaggtccacggcctcgtccgctggcggagccggatggagaacatcgccccgctcctccatacggggaaaatcaccctttatgaagccgacctcaaggacatgagctccctgcggaaagcgttggccgccgcccgcccggaccggatcttccacctggccgcccagagcttcgtcccggcctcctggaagcttccggccgagacgttcatgatcaacgccgtcgggcagatcaacctgttcgaggcggtcatggccgagaagctcgatccccggatccagatcgccggctcgagcgaggaatacgggctggtccaccccgatgaagtcccgatgaaggaaaccaatccgctccggccgctcagcccgtacgcggtcagcaaggtcgcccaggacctcttgggctttcagtactggcaaagctaccgactccgcgtcgtccggacgcgcggcttcaaccataccggaccccgccgcggcgaggtgttcgtcacctccaatttcgcccgccagatcgtgatgatcgagaagggcctcgtccctccggtcatccacgtcggcaacctcgaggccaagcgcgatttcaccgacgtgcgggacacggtgcgcgggtactggctggccttggagaaaggcgcgtccggcgaggtctacaacatcggcacggggaacgccgtctcgatgaaggacttgctcgaccggctgctcgctctcagcccggcgaaagtcgaggtccggatagatccggaccgcctgcgcccgtccgatgtccagatcttgtgcgccgacgtctccaagttcaaggcggccaccggctggtctccgaaaatcaccttcgagacgactctgcgggatctcctcgaatactggcgggccgccctctgagctctttcctcgatccgggaaacgtcatgacgtccgccgcttcgccgcgacctcggaaaaccctccgcgttctcatcaccggagcgacgggtttcgtcggccgccatctcatcacccgtctcgaggcggaggaaaaggcggggcgccgcccccggctccaaatcaccggcacgtgttatcccgagcgcccggaggaatgccctgatttccgggccgcggccccccgggtgaccctccttccgcttgatctccgcgacgcgaccgccgtttcggccgccgtggccgcctgccggcccgaccggattttccacttggccgccatctcccaggtccgggcttcctgggaccagcggcgggaaacgatcgagacgaacctgatggggacgttccacctcctcgaggcggcccggcttcgggctccggaagcccgactcctgatcatcagctcctcggatgtctacggaaaccagccgtcccggaggatgccgcttcgggaaacatttccgttgaacgcggccagcccgtacggtttcacgaagctgagcgccgaagccctggccgcgctttacgcccgggcggaaaaaacggccgtcgtcatcgcccggccgttcacccataccggcccggggcagagcccggatttcgtctgctcggactgggctcgtcaaatcgccgtcatcgaagcggaggcgacgggaaaaaagagcggccgcggaccctcgagggtcctcaaggtcggaaatacctccgtccggcgcgactacagcgacgtgcgggacgtcgtccgggcttacaccctgctcatcgagaaaggacggcccggcgaagcgtacaacatctgttcaggcaaagcccgtcccctgcgggagatcctcaagatgctgcttcgggattcccgggagaagatcgtcgtggaggtcgacccggcccgggtccgcaggtccgatatcccgcttctttccggaagctacgccaagatcacccgggagaccgggtggcgcccccgcatccccctggaaacaacgctctccgatcttctcaacgactggagagccaagatgatccgttgaccgaacggaacttccgcttcgacgggctttaatggtcttcgacggcggctaagagctcctcgggggcgcaggtcgccgtgccgatcttgccgacgacgacgccggccgcggcgttggccatgaccgccgcttcccggatcgacaacccgccgagcatggccagggcggccgtggcgatgaccgtatccccggccccggtcacatcgaacacttcgcgggcgatcgtcgggatgtggacgggcttctttccccgctcgaaaatcgacattccctgctcgctccgcttcaggatcaggtaaaggcaggaaatcatctccatgatttcccggccggcctgttcgacctcctcgtccgttcggcaggaatggcggacgacccgctcggcctcatgatggttgggggtgatgagcgtcaccggcgaaaagagggagaaattctcgaccttgggatcgacgaaaacggggatgcgggcttccgtcgcgtgggccagcacccgggtcatcatctgccgggtgacgattcccttgcagtaatcggagatgatgatcccggcgtatttttcctttttgatgagccggacgatccggtcctccatccccacgggaatggcctgctttttttcctggtccacccggacgacctgctggtgctgggcgatgatccgggttttgaccgtcgtcggccgttcagggtcgagaaagatcccccgtccgtccggaacgtgtttcttgatccactgcccctcctcgtcgtccccgacgacgccgaccagcaggggggccgctttcagggcttccaggttgtgggcgacgttgcccgccccgcccagggcggtggtgcttctctggacttcaaccaccggcacgggcgcctccggggatatgcgggaaacgctgccccaaatgtatttgtcgagcatcaggtcgccgaggacgagcacccggcggttgcggaacccgagaacggcccggcgggccttgggaagggacagagaaatcgtggtcatgggacttcctttcgaacaatgatgggattgctgcaaatccagggaacgccgcgagggagcggcgtccgggcccgaagatgcacttcgacccggtaggcgcccggttcccgggcgttgaagacgagctccggcccggttccggcggcgaccggctctccccgccgcaggaggcggatttcatgggcgaagggaaaaggggcgcggacgtggagagtcgcgggagccgtcggcccgccctcggcccagaaccggaagcccgccggatcggcggcggcgtcgacggcgttgtaaaaccggccgcggcggagggagtcaagcacggcccgggacgccgcggcatcgtcggcggggatgagggaatcaagctggatgtggaggttgagaacgccgaaggccgtctcgtggagaacacggtgcgtatcgaggctgtaatatccggcggcgggaggatcgaggcgctcttcggtttcggccagaatccggtcccacttaccggccgcggccgtcggaggatccaggattttcagaagggccagcgtgggtttgacgagaaggacgggggcgtaaaacagggcggtgccccatccccggcgaagatcgccgtcaagattgatgatctcgagcccgtcggcgtcctccgcgcttccccaggaccagcgggttttggaatagggatgggcgatgacggtgaatccgccttgggcatggacttcgcgggcggccgccccggcttcctgggagaacggccgggcgggcgggtcaaagcccagggcgactaaatgaccgcggctggaggagatttcggtaccggcgataaccaggacccggccggcgcgcccctgggcctcgagggaagcgagattgggaacgccgtggtcggtgagaatgatgaaatccaagcccgcgcgttcggccgccgcggccagctcggcgggggtcttcgatccatcggaatgccgggaatggaggtgataagcgccgcggagctcgacgggttccgggggggcggcggaaaggggagaggcctccgccgggccgccgggcggaaccatcgtcctctcggtccgggcgggcttcggcggcgcctcgtatttccgatacgacaggatttcaagagccagccaggcgagatagacggcgaacgccgtcccgaggacgatccgaaggaggcggccccatcgtcttttcttttcaagacggcgcggattcatgggattcccgttcgagccgtcgggcggcgaaaggcagggtgatcaaaatgaaaaggagctgggcgatttccgagtcgccgaagttgtattcgaaaaatccggcgacaaagagagaggtcagggcggccaggccgccggcggcgagcttccgccgggcggcccaaaaggagaagccggtctcggggaggcgccaaaggcgcccgaggcccgccagggccaggccgatgaacgcgagccaggcggccagcgtgaccaggccgcgttcggccgcgatctgaatgatgttgctgtgcagatggacattgtgtttcgccaagtagccgagcccgtacttttcgtcctggaagaccatgtcgacggtgtccggtccggttcccaggagggggtaatcggagatgatcttaaccccggccttgaaatactggacgcgggcgacattcgaatcgtcgcgcatcgtgaaaatgctcagggcgcggtctttgaccggcttgggggcggccaggaatccgagggcggcgatcacgggcaggagaatcaaggccttgggtttccagagaaagacggcgacggccagggcggccgccagcccgatccaagcaccccgggtgtatgtcagaatattggccgccgaggccagaagaaaaccggccgccagaacggcccgctcgatccggattcccttgacctcggcgcgcccggcggccgcgctttttctccggccgaatccggcgaacagcaagcccagaaccagggagatgaacaaggccgtgaggccggcttgggtcatgtaatgacccatgaacgcccggatccgctcggccgtcgtcgcaaagcggcagaagacggcgtaaacgccgttgacggccgccgataaaaataaagccgacagagcgagcgtgaggtcggcccggcggcggacggccgcgagggtgaccgggacggccaggatgagcaggagatcccgcgagtcccaaaagctgatccgagggttgaccgaagcggccgaggaaaggagcgaaagaccggcgtaagccgccaaggcccaaaagaagaccggcgtctcgaacctgcgttttccccgggcaagaaggatgagccagacgatcagggcgatcgccaggaatccttgggctaagctgatggaaatcatggagaaaaggagggcggcggccagggcggaagcgagaacgacgtcgccggccgggcgtccggagacgaaatcacggatgattttcatcatgggggggagtatagcatttattttcagcgaattgaacgcccgtctcaggggaaacgaggacggattcaagcggccggatcctccgccgggagggaaggcgggagggcggactagaaaggaagaaacggccggacggcggcaagtacttcgtcgggagatatgttccgcaggcaccggtaatcccccggttcgcagacgcgctggcggcagggccggcagtccggattcgtctcgagaatcaccgtttttgccggattgaggcccggccgccagggtccgaacaaggccggaagcgtcgggccgaagtaagcgatgatcggcgtggcggtaccggccgccaggtgcatcgggccgctgtcgggaccgatgaacaggaccgcccggcggacaagctcccgcacctcgatcatattcaagcgcccggacaaggaaaggaatcggggcgagcccaagcgggcggcgatccggtcctcccgcggccggtcgccttctccgccgacagcggcgagggagatccccggaatttcgaggagacgggaagccaggacggccgcgttttcctcgccccagtcccggaaggcgttgccggcgccgatgtgaagaacgacgagggggagggggccgccgcccggtccggcttgtccggaggcgacggccgcggtcaaggcctcgacccgggcgatttcctccggccgggcggggggaaggatcaagggagggatgtcctctttccggaaatccgcgcccaaggcccggacgagcccggcgtgggtttcgacggaatgaaggggcgaatcgagaccgcgccggggcgtcgtccggtggtagagaaagcccttggacttgatggcgtggccgatcttgagacgggcgcctcccaagagcgcgatccaggcggcccggggaccgccgtgaaaatccaaaagcgcgtcgtaccgctcccggcggatctcccggatgaggcggaggaaatcggaccggttctgcttggccgggacgacgatgacccggtcgatgtcgggatggccctcgaccaagcggcggtacggctcttcgacgagataggtcagggaggagccgggaaaccggctcttgaggagggagacggccggcgtcgtcagaacgatgtcgccgagacggcggaaacggagaaggaggagggagcggggattcaaatcactctttgacggcccgcccgggttcgatcgccgcttcctcgatcagcatcaccggaatgtcgtcccggatcggatagacccggtggcagcggaggcacttgaggccttgttcatcggccgtgatcttgacgtcgccctggcattccgggcaggcgagaatgtcgaggagaaaagagtcgagggccatgacggactcctgcggatgatctccgctgccgtaaggatacgccaccgctcgatcgccgtcaatcgttcagggtcgcttccctctaatcccgcctccttcctcccggcttcggctgccccgatccgaaatcgagataaagccttaagaagcgccttcccgattgacaagagccgaagccgtggaataaaacaggtccgtgcgttttgaatttttcggcggttttcttccgggctacccgcgcggcgcggttctccgcaagggtctcggccggattggagccgaagtcgtcgaatgccgctttggggcggggctgaaatcctgggcccgtcacccgctgcttctcctggatgcgttccgtcggggccttctccggccggagggggcggcggccggccgctgtctcttcgtcccggagttctgcgccaaggacgtccccccggcccggttgctcgcctctttgaccgcccggccgttgattttcgatccgctcgccgcccgctacgagacgaaagtcattgactggggctgggggcgcccggactcgcccggggcctggtggaatttccagatcgaccgggcatccttcgccttggccgatctcgtcttggccgacacggccgcccataagaggtattattgcgaaacctacggcctttcgccggccaaggtcgaggttgtgcccctgggctacgacgacgacgttttccgcccgccggcggagacggaactcctctcccgggcgctccggcccggcaacggttttcaggtcctctttttcggctcgtttctgccccttcacggagtcgagatcattgtcgaggcggcccgtttggtttggctgcgggatcggtcgatccgcttccggctgatcggagaggggcggacgtcggctgcgacccgggcggcggccgcggatttagccaacatcgatttctcggggcgcgtgcccatgacggaactcgcccgggcggcggctgcggcggacgtttgcctggggatcttcggccggaccgcgaaaacgcggcgggtcgttccccataaaatcttccaggcgatgggcctggcccgtccggtcgtcactctcaggactccggccgtcgaggaattcttcgcccacgacaaaaacatcgttttatgcgacaaaccggatccggaagccctggcccgggccgttctcgagttggcccgagatcccggccgacgggagcggatcgcccgggccggcttttccctcgtccgccgcgagttcaccccggaggccgtggcccgccgcctcgccggcttcgcggccgatcatttcgggccggctttcgccctttctccgccggcgccgggaggaggccggtgatggaaatccgctcgctcgccgtcccgccctaccgcggcttccgaacggcctcccgggaaggagaggcggcggccgccgctctggaggattttccgggatttctccgctcgcccgaggctgaaacgctccaggccggacgaaatcaagtcatcgccgtccgtctttccccggaccgggacgccgtcgtgaagatcttcgggacgcgcggggttcagaagtggaaaaccctgcttcttccctccaaaggacttcgggcctggaagggagccctggctctggtggaaaacggctttgaaacggccgagccgatcgccgtgtttgaacgccgccgcggcggaatcgccgttgaaagcgtcttcatctccggccgcgtcagaggcggacgggaaatccgggagcacttcctccagtcttccgaggtcgttttgcgccgcctgctttcctcgttggccccggttctcgcccgcctgcacggccgggggatcgtccatcgcgatctttccgacggcaacattctcgtttttgaaaacgaagaggccgcggccgctccggccggaggcggattccagtttctgtttctcgatacgaaccgggtccggcgccggcggccggggattttcaaccgggcccggaatctcgtccgcctgggcgtgccgcccggactccagccgttttttctcgaccaatacaccgcggcggcgggcggccggttccggcggcgacggttcggtttgtcttaccggatttccaagcgggtttttatctcctggctggctttcaaaaaaaggctccgcctccgggccctcgcccgccggctccggatccagtgattcgatcatgaggttcaaattcgagtggaatgacatggccgatcagccgcacaatgtcgctccgcggtccgatcggacccggcatcatcttcgccgctggccgtcctacttggagctgatcggcctcaacctcgtttgggacccggcgattttttggcgataccggacgctccgccgacgcctgttccgccggccggtggacatcactcccggcatgttcggcctggcggtttcgccgcgcttcggccgtcccggcgaaacggacgccgtcctggccctgcttcgggaaacgggcgtccgccgggtgctgttccgttttccctcgtgggaaagggatcggctcgaggattatgccggattcgccggccgccttcattcagagggcttcgaaccggcggccgccctgctgcagcggcgagaggacgtgttcgccgtggaagcctggacggatttcgcggagtccgctttcgaccgcctcggcccggcctgtccctattttgaaatcgggcatgcttggaaccggacgaaatggggggtttgggaccaccgggaatatatccgcctggcccgggcggccgcggccgcccgcgaccggatcggccgaaaaaacatcaagctcatcggcccggcggtcatcgatttcgaatatcacctctatccgcccgttctaagggccgtggatttcgacgtgatcagctcgcttttgtacgtcgatcgcgtcggcgctccggagaatccccagtatggattcacggcggcgaaaaaaatcgctttctttcgggcgtgcgccgacgtgctcgtcccgggcggccggcccgcttggatcacggaattcaattggcccttggagaacaccggggcctggtcgccggcggccggcaagcccaacgtcggagaggacgtccaggcggatttcctggtgcggtattacgtcatcgccttggcgagcggatggatcgaccgcgcctattggtggcagctcgtcgcgcccggatacggcctggtcgacagccgggagtcgccctggcggaaacggccgagctacgccgcgttcgccttcatggcgtccatgctttccggaagcgtgttcaccggcaaggaggagacgccccggggcggagggacagccggccggggcggtgaagtctatcatttccgcaagggcggccgggagttcgccctggcctggacgcggggagggccgcttcgccgggagttcgaccggccggtcgccggcgtcttggaccggagcggccgcggcctcgcccaggaccgcgacggcggtcttatccgtctcgatgggagtccgcgttatgtcatcttcaagtagattcaccgggggtggcgtgcgggagtatgaaaagcgccgctatcgaggactcgaccagaggatcgtccatgcccgggagacgaagatcatccggaagatgcttgccgaggccgcgaaagacgccgccggccgcgacggaatgaggcgggttctcgacatgccctgcggttacggccggttcacggcgatgctccgggaccgggggcttgaggtcgtcggcgcggacctctcgctcgagatggcccgccgggcggcggaaaacacggccgggggggcgccggaggagggaggggccggacgcgggattccggtgctcgcggccgacgcgcgccggctgccgttccgggccggagccttcgatctcgttttttccatccgcttgttccaccatatccactcccccgagagccgggaggcgattctgggagagttttcccgggtctcctcggcgtatgctctcgtttcgttctaccgggccaacggcctgcacgaggttcagcggcgtctccgccgggccttcggcaagagccggacgaacatcaagatggtcgagcccggggtgtttgaaaaagccgccggcgaggcgggattctccgtcgtccgcgtccttccgctgttcggcggaatccacgcctaccatctggccttgttgaaaaagcggccggcggattagaatcggtatttcaacccgatccggacggagagcccggtcagatcgagccgcgcttcccgggcgttctccacgccgctttcgaacggtttcccgttccggatgaagaccaggggatacgcggtccggctcgtggttcgaacgtcaaaagcgtagagggtgcccgtctcaagatacggttcggttgaaatctcgtcgcggtaggcgttggttcccgagaatccggaaattttcgcgtaccgcccgctcgcttcggccgtgagacagaaatagcggcctaaggataaatcgaggccgattcccgccaggaagcccgctcccgacgcggtcgcctccccttcccaatcccgcaggatgtctccatgagtgaagacataacggtattccgcccgggtgaagaaatagccggctccggccttgagatagaggaagtccaggggataataagcgagcgtaagatgtacgggaattgcggaaaacgagggcttgaccgtcagatcggacgggatttcggaatcgccggcaaaggccaggacgtttttcttggatgcccggagaaattcggcgcccaccgagagacgcagccgcgggagaagcttgaatccgatttcgccgccgtattggagcccggtccggaggggggcggtctctccgccggccggccgatggatctggtcggcatagaaatccgccaggccttggatgccgtcgttcaaatccccgacggccgttattccgccgccgccccaaaggaagagtgaaacgggactttcggcggccgccgcggccatgatttcccgggtcgcctcgtagacggacggcgggggctcgaccggggcgggttgggtcgctttcggccgggggacggccttggccggcggcggctcttccttttcgacttcctcgaccggagggatctcgacgaccggagcgggaacgggctcggtgatgggaatgtcctcgagagccaaaaccaggctttcgtgaacataaccggagatcgtgccggtctcgtcgggctccatcttgaccaggaaccattccccttccttgcgctcggcctcgagaaccgtgccttcggggaactggcggacgatgttgctgccgataaacggcttgacccggacgttggcgatttcggccgtgactttgagcttgatgacaggcgagccgaaggcggctgccgcggcgaggatgaatcccaggaaagcgatcgggaggatgcgggtcgcgcgatattccatttccaacctccgatccggattcgccttcagtatagcacgtttgcggccgggcggcggcttaaaaaatcagcttcaatccgatggcgatctgaaaaaacgacgggtcgacggacaagggtgtcgtccgcccggcttcccgggccgcggccgcctcgtcgaagttgaaagcggccacccggtgaaaaatcccgtcatagacgcccggcgtccaaatccaggaaaattctttccgcggagcgaagccgtaacgtccctcgacggcgagggaaagggccggagagagcggaagatcgagtccggccccggccgtcgcgccgggggagatccaggtggtgtcctccacgcggacggggacgaggatcgcgtccgtcaggccgtcccggatcgccgccgcgcccgcctggctcgaggtcaggatcgaatggaaaaaaagagccggaccggcggcgacgtgggcccgaagagcttttccggcgaagcggaattcgaagctcttgaaaaccccgatgaaaaaggggacggacgtgatctcgccttcgccccctccgtcgacggcggtcgaggccggcgtcgatccgggcggattccaggagaaccggccgacgctttccaatccggctttgaggtagccgaagcccgcttggatcccgaatccgtttttcaagaaaaaggtcgcggccgcgccggtgaacacggccggggcggaggatgtccggattcggttctcaaccgtcggggaagccgccggagaggcggtctcggcccgatggagcgacattccctccgccgccgggaggccgaggccgccgaaaacaacgatttccacccgttcccagagacgggggggagcatcgccggccgtggacggggcggattcccggccgaaggaggccgccgggccggcggccaggaccgccagggccagaacggcgcctggaaagagaggttgtttcattttgtcatccgttcgaacctcaaagggttggcggcagccatggggacgcctatcttacttgccgcggcgttccgcggcaacctcccgatgaagggacgcctcattcatcccctcccttccctggagggacttcgtgaggcgttcgcttgcctccttgaagaggggggttgaaatgatgtacattttggtcgtcagggaggttcccatgagcagaaaccgttcgcttaaaacggccgtcgccctttgcctcgcggccgttctggccgccggaacggccgcggccgtgaagccgaaaatcgtgttcaagacggaatcgtgggatttcggcaagatcaagcaaggtcaggacgtctcggttgatttcgttttcacgaacgagggcgacgacgtgctccagatcggcaacgtcgagtcctcctgcggctgcaccgcggtcttggtctcggacaaaaaagtaaatcccggcaaagcggggaagcttcaggtcacgttcaaatccgccggctacagcggcgaagtcgtcaaatatatctatgtggagtccaacgacccgaacgcccgccggatccagcttaaagtccaagcggccgtggatgtcccccctcagccgaagatcgacttgagccagtatacttatgacgccgggctgatcgttgaaggggaatccctggagactcccgtcgtcgtcaagaaccgcggcgagctggagctctcgtttgaatgcgccctgccgggagccgcctttttcgccaagggaaagccggccgcctttcccatcaaggtcgcggctggaaaagaagcggagatcaccgtccgtttcccgctggcgggccgggcgggattcgtccgtgaattcattctttttaaaaccaacgaccccctccggtcgacgatttcgatgactctcagcggatacgtcgtgaccaagcttcagctgaagcagattttcgaaaaatacaaaaccatcattaagtagcccgcgtcggactccgaggcggttcccgggccctgagaaaaatccggttccgggccgtcctttgatggtgatgccgctcttcaaaggacgccgttctccggagaaaatcgctttcttggccctcaacctggctctttgggaccggttggcggccgtgaaaaaaatcctgaccctgtttcccgacccggccggagcgttcgctctctcctcggaggagtggtcggccatcggtttcaggccgcagatcgcggcccggctcggcgcgcccgggctcctggaccgggccgaaaaggaatttgacaggtccaaggagaaaggatattctctcctgactctcggggacgccgaatatccctcctttcttagagagatattcgatccgccggccgtcctgtattgcgcgggacggaccgacatcctcgagaggccggcggtcgccctggtcggttcgcggcggccgacgccgtacggacggaacgtggccgaacgtttggcccgcgacctgtccggacgggggatcgtggtggtcagcggcttggcggtcggcatcgacgccgccggacaccagggcgccctggacggaggacaaaccgtggccgttctgggatccggtctcgacgtgccttatccgcgggccaaccgccggttgttcgagcggatcaccgaggagggggccgtgatatccgagtttcctctgggaacggacccgctggcggcgaatttcccccggcgcaaccggatcatcagcgggctttccagggccctgatcgtggtcgaggcggcggaaaagagcggttcgttgatttcggccggtttcgccctcgagcagggccgggaggttatggccgtgccgggcaacatcacttccgaggtcagccgcggaacgaacggcctgatcaaggccggggcgaagctagtcgagacctggaaggatgtggccgaagagctgccggccccggtccgggaggcgttgctgagccgggaagaggacgaaccacgggagcctctgccgctgctttccagcggggaagcggccgtccggaggcttctttcgcccgagtccccggttcacgtggatgaattgctggaacggacggagctctcgatttcggagctcctgaccatattgctttccttggagatcaagggcgtcgccgcccagctccccgggaagcgctatttgaggagactgtgatggacaaggccctcttgatcgtcgagtcgccggccaaggccaagacgatcaataaatacctgggttcgggctatcgggtgatggcctcgatggggcacgtccgggatcttccgaaaagcaagctcggcgtggacgtcgacaaggatttcgaaccccaatacatcatcattcccgagcgcgagaaggtcgtcggcgagcttcgggcggcagcccggacggcctcatcgatcatcctggcggccgatccggatcgcgagggagaagcgatctgctggcatctaaaagcgattttcgatgacgggaagaagccggtgttccgcgtccggctccaggaaatcacgaagcaggcggtggaggacgccgtccggcacatgggcgaattaaatgttcatatgttcgaagcccagcaggcccgccgcgttctcgaccggcttgtcggctacaagatcagcccgctgctttggaaaaagatcggccggggcttaagcgccgggcgcgtccagagcatcgcccttcgcctcgtcgtcgagagggagcgcgagatccgggctttccgaaaagaggaattctggacgatcttcgcctacctggaggcctcgctccccccccggttcaaggcggcgttgtccaaaatcgacggaaagaaagccaaaatccccgacggcgcctcggctcaggcgatcgtcgatgcgctgaaaggcgcccgctatgtcgtccgagacgtcgccgtcaccgaaaagaagaggaatccgccgccgccctatatcaccagcactcttcagcaggaagctttccggcttctccgcttccccgtcaagaagacgatgtccgtcgcccagaagctctacgaggggcttccgctgggcgaacgggggccgatgggcctcatcacctacatgcgcactgattcagtccggatttcggccgaggcccaggcgtgggcccgggcggccatcgtccagtccttttcggcggctcacgttccctctcatccgcgggttcacgccaacaaaggcaaggcccaggacgctcacgaggccatccggccgacttcgcccgaactgacgccggaggcggtccggccctatttgaaaaaagaggaattcagcctctaccagctgatttggaaccggttcttcgcctcccagatgagcgcggcggttctcgaagagacggccctgaccatcgccgccggcgagcggttcctgtttacggttaagggcggcgtgatcaagtttaagggctggtgggagctttatcccaaaaaagaggaggacgaggaagatgccctcccgccggtcaagaaagacgaaacgctgaccctggccgagcttgagccgaaacagagcttcacccagcctccggcccgttataccgagggaacgctcgtcaaggaacttgaagccaagggaatcggccggccctcgacgtacgccccgatcatcgccaccctgcagaaccgcgtgtatgtcgtcaaggaggagaacaagttcgttccgaccgatctcggcatgttcgtcaccgatttcctggtcaagcatttccccgacctgatggagtacaaattcacggcccggatggaaggggagctggatgaagtgagcgaggggacgctggactgggtcggggcgatgcgggatttctacggccggctccaaaatgatctcgcggccgcgggcaaagtcgaaagcgtcgccgggacaggaatccccctggacgaaaagtgcccgaaatgcgggaagctgctggtcaacaagggcggcaagttcggacggttcaagtcctgctcgggatatcccgaatgcgattactcggatgatctttataaaaaaagcgagcccgttcccctcgaggaaaaatgcccgacgtgcggggcgaacctggtccagcgggtcggccgctacgggatgttcgtggcctgctcgaactatccgaaatgccggttcatcaaggggaaggaaaaggtcgatacggggatcgcctgtccccaagggtgcggcgggacgcttttgaaaagaaagacgaaacgggagaaattcttttacggctgcagctccttcccgaagtgccggttcgccacctgggacgagccgcttccggaatcctgtccgaaatgcggccggccgttcgtcctccggaaaacgaccaagaaggacgggacgtacaagcactgtgtcgacgagaactgcggctggcgcgagccggcgtctcctccggccgtcccgcctcgtccggcgggggaagaacccgagccggccgggaaagacggcgactcgagggaagacggggggggtgctccggacaaaccggggccggaagccggcggggtctaagatcaattcccaaaatcgcggccgtggcgcagcttctccgccttgagggagaacgcctgaggagtctgggaagaataaaccggaaatatcgatccgccttttttttggatatgcggacggatttcgttaaaatgaaacagggccggcggcgccggatccggacgcatgcgcaaaaacatcgatgagttcctcgagtacctccggtatgaaagaaacgcctcggcccataccgtggccgcctaccggcgcgatcttctccagatggccgcttatcttgaccgccgaaaagtccgcctggcccgggtcgataacatcattttgcgcggctggatggcggatcttcacgaccggcgcctttccaagacgtccgtcgtccgcaagctggccgccgtccggtcgtttttccagtattgcctcaagcgacggatttgcgatgataatccggccgtggtcgtgacccggccgaaactcgacagtcccgtccccggttttctttcggagggggagatcgagcggtttctggatcttccggatagaaacgaccgtctggggccgcgggaccgggccattttcgagttgttttacgccaccggcatccgggtcggcgagctggccggcttggacgtctccgacgtcggcttggaggagcgcctcctccgcgtccggggcaaggggaaaaaggagcgcatcgttccgttcgggcggacggcggcctccagcctggcggcttattttgaaacaaggcccggctttttgaagggacctctcgaccaagcggccttgttcctgaattaccgggggggacggatcacgtcccgttcggtggagcggctggtcgccaaatatatcagaaaaacggccatccggagaaaaatcagcccccattcccttcggcattcgttcgcttcccatctcctcggccggggggccgatcttcgggtcatccaggagctgctcggccacgaaagcctggggacgacccagaaatacacccatctggacctgccccagttgctcgccgtctaccgcaagagccatccgcgggcttgacgtcccgtctcccgccgttgacgcccgaatcgccatccgtctccaaaaattgccgggggcggagccgcggttcgattcaagtcattgaaataaatggagataataaaatttcggttttggcatgccgctcgctaaagaaagggcgaaaggaggctcaacatgaagagcttgtggatgaaaggggcggttttgggaatcatcgccgctctcttggtcgttccggccttggcccaacaggcggccgccgccggcggcgaaaaggccgcgggcggaaagatcaatttgaacacggcgccgctggacgagctgcaaaagctccccggcgtcggcgccgcgatcgctcagcggatcatcgatttccgcaagatgaacggtccgttcaagaagatcgaagacttgatgaaagtccgaggaatcggcgagaagatttttctccgattcaaggaccagttgagcgtttaagatccggcgctccctccacgcgtgcgggaatatcccgccggcggcccttcccggaaggggagggccgccttttttatttcgagagaaagcgacggagacggaccttcatggcggccagggcccggccgcgatggctgaccgcgtttttctcttcgggagagagctctgcgaatgtcttgccccggggatggtagtagaaaataggatcgtatccaaagccggcggttcccttgggtccgacggcgattgttccgcggacgacgccgcgggcttcggcgacgatccggccgtttcgggccagagccatggcgcagacgaagcgggcccgccggccggaccggggaacggaggcaaggaggcggagaaccttggagacgttctttgcgtccgtcgccttcggcccggagaaccgggcggagcggacgcccggttctcctccgaggaccttgatttccaggccggaatcctcggccagggtcaggaggccgcttcggcggctgtagaattcggctttggcccgagcgttggccgcgagcgttttctctgtttcggggcagacggcttcgatgcccgcgtcgtccagggcgacgaagcggacggcttgcatcgccagggcagcggcgatctcccgggctttcccgcggttggtcgtcgcgatcaggaggggctctcccgggccggccgcggatgtcattgtccgatggcgtcctttaagaacgcgaggacgaacagaagaacaagaaagagcgcatagagcgcgtatttcggatggatgaaaagcttttccggctcctccatcatctccgcctcccggagcgttttccggaaaatcaagccgaagaagacgaggaggaacggagcgatggcataaaaggattgaagcttgaagatccagccgaagtaaagaaaggccagaagacagatcagggcgctgacggacatgccgatcaccagcgacgtccgcgagtatttccggtgggatatccggtattctccggctttctccttgaggaaacggaactcggacagccgcttggcgaccatgagaaaattgccgaacgcccaccagcagacgaggacggagaggggaggaagctttccggaaacagccagggccgaccagccgatgagaaaacgaatcggattattgaccgattcggagacggagtcgaggaaagggatgtccttggtccggatgggggggacgttgtaaacaatcccggcggcgagcagggacagcagggcgagggtgaatgtccggtcgaacaagaggacggccgccccgccgcaggcggcgacgagaagaaggccgatgagagcgaagggaaaggctttaatttcaccgctgacaagaggccggagacgcttggtcggatggtggacgtcgaaggggcggtcgacgatttcgttgaggacgtaattggccgtcgagatgccccaagtcagaaggaacgccgcggccagcctccagatggtttccgccggagagagcgcggcgacatcctcccggtgaaggaaaacgaagacggcgctgcccaggaaaatggccgagcttctcggccaccgctccaggcgcagggcccgcagataggcgttcacgaaaatggatccttgacggcgtatatctcgaacgaatcgccgagggccaattttatcgggatcttgcggagaaatgaagaggcccggcttcgggcgaaggaatccatccagcggaagcgggagacgagataatgaaggctgaatgtccaggcatagcggcggatttcgacgatccggaatcccgctccctcaagaagaacccggaggcttctcttggaaaaataagccaggtggcccggccgcaggtgccaccagcgccggccggccaggcgggccgccgggctgtgaatgtcaggggtgacgaggcacaggacgccgcccggggccagaagggagaaggccatggcggccgcctcggacgggcggggcgtgtgctcgatgaaatcgaccatggtcacggcctggaaggaatcgccggcggcggcgatgtcctcgaatcctccccggcggagggtcaagccatacttttccgcggccttccggacggcccaggcgctcggctccacgccgtcgacccgccagccgcgccggcgggcggcgtcgcccaggatgcccgtggccgcgccgacgtcgaacagggctccgcggccgggacggaagagatccagccggttcaggatgggcaggaaattccgcgtccgtccttcggcctcctggtcataaagcggatcttccacttccccgtaaagggaggcaaggaaatccggcgccgggtacggatcggcgaagatgtggccgcaggcgccgcaggcttgaaggtcccacgttttcccgtattcgctgtccgtgattttaatctggtcggatcggaggccggagaaatcgaacgtcccttttttccatggacgaatgtcgaggccgcggcaaacggggcaagccccggcgcgaaggaaacggccggtcattccttcgaatccgcttgggcgagggcccgggccgcggcgctccggatttccgccggcgtgaacggcttggtgatgaaggcgaaggcgcccattttcaaggattcctgggccgttttgatcgtcggatagccggtgatcatcagaacaggagtggtgggccggtatgtccggagggacttcaacaagtcgaggccgctcagaccgggcatcatcaaatcgcagataataagatcgtagcggacggcggccgtccggatgagcgcgtcctctccggaaaggacggtctcaatttcgacgccttccccggccaaggccagggcgatgctttggacaacggagcgttcatcgtcgatgatcaagattctccgttttgtctcggtcatggtccaattcctctgtccccggtttccgtgtccgccagcggccattgtatcgtaaagaccgcgccgcggccagccccgtttcgggcggagatggttccgccgtgctgctcgacgaggctggcggcgacggccagccccaagcccgttcccgaggatttggtcgtgaaaaaggggtcgaaaatccggtcgaggttttcctccgggattcccggccccgaatcggcgaatacgacctcgatcgaccggccgtcggccgagcggcggctggaaacatcgatcgttcctcccgagggcatcgcctcgcaggcgttgaggatcaggttccagaacacctgttggattttcgctctgtcgagaaagagcggagggagcgtccggtccaaatgatgggagagacggacgttgcgggcccaggcctggccggaaagcaggccgatggtgcgttccacgacggcgttgacgtcgagggcggatttctcgggcggcgtccgccgggagtattcgagaagccccttgacgatccggccgcagcgctcggtttcctcggcgatcaggcggagagcggccgcggccggatcgtccggccgagctttttccagcagaagatgggcgttgatgaggatggtcgtcaggggattgttgatttcgtgggcgatgccggcggcgagttgcccgagggaggccattttttccgatcgggccatggattcctggatgttgcggagggcgtgggttcggtcggcgacccggctttcaagagtccacgtccattggagaagattttccttggccttgcgaagctcggcggtcattcggttgaacgccccgccgagctctccgatttcgtcgcggccgccgaccgggactttcaggttcaggtcgccttgggcgatccgggacgcggccgcggccaagtctcccaacggccggacgagacgcgtcgccatgagggaaaggaggatcagcagaacggccgccgtggccgcggcccaggcggcgttttgggtgatcacccggttgcggagagcgagaaacggccgttctaaaagaccgatgctcagcattccgacgacggtcccgtcgtaatcggccaggggctcggaagcgctgatgtaccgttccccgagaatgacggcccgcccggcccaagctttccttcgttcgagcgcctcctgccggaagcggggatccgcccgcgttccgttcaaccggctcccctgggggtttttgagggttgtcgatgcccggatgtcgccttggtggatcgtgacgacgcccgtgtcccggccgccgcgtttttcgggatcgaaaatcgcggctttgacccggtcgacgatctcgttgtcgccgttgatccgccgtccgccctccaggacgccgatgatccttccttccgggccgcggacgggcgccgccgcgacaaggacgaggatgtccccggccgcggattcttcgaaccgggtgctttcccggcggagggaatccagggggagaagccgcgtcgcggcgagccgctttccctcgaggacccgggagaaaaaagaatcccggtcccggaatccgccggccggaacggccggatcggagagagcgatccgtcttccgtcggcggccgcgaacgatagaaaatcaaaacgtcccgcttccgcggcccgagccagatggaaatccagttcggcgttcggctgggcggagcgggggagacgcaagagctccgattcggccgtcagggtcacggccgtcagcaggttgtccaagtaaaaggaataaatggtccgggcggagtccatatcgtggtagatccggttttccgccagggacatgatcgtctggtgttcgagtcgcaggccgaggatgccgaaaacaacccctccgaagagaacgatggcgagaatggcgaggatcatttttcgcctgagagggagatcgacaaaccggaaaggcatcttttccgccgcagttattttatcataaatgaacttgacagaaggcccgggaaatgataaatcagatggccgattggtatagtcaactaataggatagttcttttgagactgtcgacgaaaggcgagtatgcgagccgggcgatgctcgagctgacgttgcattacggcggaccgcctcttcacatccgagacatttccagggtccaagacattccggaacgtttccttgagcaaatcctcctccaaatcaaaagggccggatacctgcgcagccggaaggggcccaacggcggatatatgctctccaagccgcccgaagagatctccgtggcggagatcatccgcgtcatggatggtcccctcgccccgatcgactgcgtcagcgtcaccgcccgcgaagtctgtccacgggaaaaatcgtgcggcctccgctggctttggaagagaaaccgggacgcgatcgccgaaatcctggaaagcacttcctttgccgatgtcgcagaaatgacgcgaaaagcgatgagggccaataatgaaaacggaaatcaaaagacgccggataagggataaaatttttttaggaatagtcgatattaacaatagactatatcaactaaataccgggaggtgatcatgtcgaaatggaagaagacggccgggctcctgatcgcggtccttgccctgatcccggcggctttcgccgaggaaaaaacgccgcccccatcggtgacggcggggaaaaccctcaagctttcgggtttcacccaagtcctcggcgctctgcaggaccaaggcgtcgacgccttgagcgtccgccgttcgcgcttcagcctgtccgccgatctcatgaagaatatcaaggccaagttcacggtcgatgccgtccgaaatcccatccttgtcgatgccatggtggacgtggttttcgccgagtctgcggctctccgcttcggccaattccgggttcctttcggcgcggaaaatgacacgtcctcggccgacttggatacgattaatttttcccaacccgtcagcaagctggccccgggccgcgacgtcggcacgatgggccgcgacgtgggcgccatgctgaccggacaagtctccgtttttgattacagcctagggctcttcaacggcgccggagccaacaagaccgatacgaacgacgcgaaggatttcgccggccgggtgggggtgaagccatttgactttctcacgatcggcgcgtccctctacaagggaaaagccgacgccgcggccggagcgccgctcatccgccgggatcggaccgggctccacgccggcgtctctttcggggacgtgtcggtgaaaggggagatgatctgggcggccgacggcgagatggaccgccggggatggttcgtccaagccggctggtttgttcttcccaagcagctgcagatcgtcgccaaggtggatgcgtacgacaagaacacggctttggacgatgaccgaaccaacctttataccgccggtttgaattggatgatttccggcaaaacgaagcttcaggttaattatgaatacctgagaaacgagctgggggggacggtgaataaagccctcttggttcaatttcaggccggattctgattaaagaaggagagatccatgaaaaaactgatgatcgcggttctcctggccgtctcggtcctgggcggctttgccgccggcccggctcaagcccccgtcctggaaggccaggtctcgatttccggcgcctgggctctttatcccatggtcgtcaagtgggccgaggaatttcagatattgcatccccgggtgcggatcgatgtccaggccggcggcgccggcaaggggatcgccgatgtgatcgccgacatggtcgatttcggcatggtctcgcgcgacgttcaccccgtggagatggagaagggcgctctgccgttcgccgtcaccaaggacgccgtcgttcccatgatcaactccaagaatccctatctccccgaaatcctgcggaaagggctgacccgccaggcgttcatcgacatttggattacgaagtcggcgaccgtctggggcgacgtcctggacggcaaggcgccggcgccgattcatgtcttcactcgctcggacgcctgtggcgcggccgaaacctgggccttgtttcttgacaagcgccaagaagacttgggcggcgtggccgtctacggcgatcccggcttagccgacgccgtccgccgggatcccctcggcatcgggttcaacaacgtcaatttcgcttatgacccgaaaacgctggccccgatcgccggcctagtggccgtgcccatcgatctcgacggcaacggcatgatcgatccggtcgagcggttctacgggacgcgcgatgacttgacgaaggccatcggcgaaaacaagtatccctctccccccgcccgggacctttacctggtttccaagggcgtgccggccaagccggcggcggccgccttccttcggtggatcctcggagaagggcaaaaatacgtccccgaaaccggttatatccggctgagcgaggacaagctcaaggcgggactcgcccttctcgataaataagggatgaaatcgacccctgttttctgatatgatgcgccctttccggagacggtcaaggcatggtcaaacggctgtttaaagagcttgccgcccggcggctgatgtttctcgtcaccatcctgccgggggcgctcgtctttttgatgctgttcgggctgtactcccggtcgcggagcattcttgcccttcattctttttccgatcttctcttcggttcgtcctggttccccttgaagggcgaattcggcttgtacccgttcctcatggggacggtctgggtgacgctggcggccatggccatcgccgtcccggtttccctgctgagcgcgatttacctgtccgaatacgcgccgcggcggattcgggagaccatcaagcccatcgtcgacctcctttccggcatcccctcggttgttttcggcgtctggggcgtcctgatgatcgtcccctttgtggcgaaaatcgctccggcgttcggggcgtattccaccgggtactcggtgctggccggagcgatcgtcctggccatcatggtctttccgacgatcatccatgtctccttggaggtcttcgcctcggtgcctcaatccctccgcgacgcctccctctcgctgggggcgacgaaatgggagacggtcaagcacgtcgttttacgcaaggggctggccgggatcatcgcctccgtggccctcggattttcccgggccttcggcgaaacgatggccgtgctcatggtcgtcggcaacacgcccatcatcccgaaatccgtcttcgacagcgcctatcccctgccggctcttctggccaataattacggggaaatgatgtccattcccctgtacgacggagctctgatgctggccgccttcgtccttctcctgatcgtccttgtgttcaacatcggcgcccgcgtggtcctgatccgggccgagcaaaaggcggaatgatgggcttccggcggcggaaactggaggaatcgatcttcaaggtgttgatgatcggctcgaccgtgatcgtcatcggaagccttctcctcatcatcgctacggtcatcgtcaagggattcccggccatgaacctggccatgatcactcagacgcccaagggcgggtactacctgggaaaagagggcggcattctcaacgccatcgttgggtccctggagctggccggcggggccaccctcctggctctcctgttcagcctgccgatcgtcctgtacattaatctctacaagcggcggaaatcgcggtttgccgtcttcgtccgcttctccctggacgtcctttggggcatcccctccatcgtctacggggccttcggcttcatcctgatgatgatggtcggcctgcggacgtcgctcctggcgggcatcatcgccgtggccctcctggagcttccgatcatggcccgggcgatggacgaggtcgtccggctcgtcccctcctcgctccaggacgcttcggcctccctgggggcgacgaagcttgaaacggccgtccacgttatcgtccgtcagtgccttcccggcatcatcaccgcgattttgatcgccttcggccgcggcatcggcgacgccgcctcggtcttgtacaccgccggtttcagcgaccgcgtccccggggcgctcctccagccggcggcgacgcttccgctggcgattttcttccagctcggcacgccctacccggaggtccaggagcgggcttatgcgtcggccgcgatcctgacgatcatcattctcgtcatcagccttctctcccggtggtacagccggaaattcagaaaaaactccgccatttgaccgaaggattgccatgaacgccaagacgcatatttccatcaagaacctgacggtgaccttcggccggcagaaagtccttaaggacgtctcggtggatctccctgatcaccgggtcacggccatcatcggcccctcgggctgcggcaagacgaccttgcttaaaaccctcaaccggcttttggacaaagtggatggcgtgaaggtcgagggtcaggtcctggtcgacggggaaaacatttacgatccgaagatcgaggtgacgcggatccggaagaaaatggggctgttgtcccagaaaccgcaggttctgccgatgtcgattttcgacaacatcgcctatggtccgcggatccacggcgttcgggagaaagcgaagctgcggcagattgtcgagcgccagcttgcggccgccgggctctgggacgaggtgaaaacccgtcttcatgagcccgcctcccggctgtccgtcggtcagcagcagcggctgtgcctggcccgcggcctggccgtcgaaccggagatcatcctgggcgacgagcccacctccgcccttgacccgcaatccagccgcaccgtcgagcagcggttgatcgacctgaaaaccgattatacggtcatcgtcgtgacccatattctccgccaagcccggcggatcgcggattatatcgttttcatgtacctgggggagctggtcgagcacggcccggcggccgaggtctttgccgagccgaaggatccccggatgaaagcctacttgaccggggaaatttcctgaggaaaccgccgcgcgcctgaggcgtcctcggcttcccctcgtcttgggaggagcggtgaataaaggaacagtttggggggggctccggacgggggtcgcggccggcttggcggccgggctcgtcgacgcgctcttcgccgtcgcccaatccggcggcggcctggccggatcatcattggcggcgttccttatctccctttccctatggggaatgatcggaggactggggacggccgccgtcggcgccgtttttcccgaggccggcggagacgcgcccgcccggcagaaaacgaccgtgatttctttttgcaagaaggctctttttgattttgttttgaccgttcttttcgtttcggcggcgggcctcctggccggccggacggccatcctcgtgtcaggggcgaaggatttcgcggggctggcggccggagtcgcggccacggccttcgttctctcggccgccgggatcgcgacctggagacaacctcccggcaggcggacgcgttttttacggatcgccggttttgccggcctcggtctcgtcctaataatcatcgccctggacagaggaggaacccgcgccgggaaaattgatgccggcggcggcgcccccgcgggccgacccgctcctccggccggatccccgtccgttctgctcatcgtgatggatacggccagggcggatcatgtttccttaagggaaggggagcgggaaacgatgccgtttctccgccggctggcggccgaaagcgccgtttatgagcgggcggtttctcccagcccctggacggttccggcccacgcttcccttttcaccggacagtacgccgaggttcatcaagcgaccttcgagcatcgcacgctccgtccggaattggaaaccatggccgaactcttgaggagcgccggctattccacggccgctttttcctccaatccgaatgtgtcctctttgtttcacttcgaccagggattcgaccgcttctatgaaatgttccggctctccgggctgtgggatgcaagaggcctggatcccgtcgagaacctgaaaatcctaaaggggctgggcgcggccttgggatcgccccgaaaaaagcggtccgaccgggcggccgccgagacgcagccttggatcgcccggtggctcgattcgcaaaaccggcgggacaagaaccggccgtttttcattttcgtcaactacatgccgccccatcttccctataatccgcctccggcgtatcgccgacgcttcctgaagaatcggccttctcctcccgtccgcaagctgatgaccgacgcttgctatccggaggtctggaggctgatcgcgttcccgaccctgatgaggccggccgattacggccggctggccgagctgtacgacggcgagctggctttcctggattcctgcttggagcgcctgatcgcgatgtttcgagagaggggtttgctcgaggagaccgtcgtgatcattacctccgatcacggggagaacctcggcgagcacggcggcttgttgaatcattcgttctccatccaccagacccttctccgcgttcccttgatcgtgaggtatccgagggttttcgggaaaaacaagcggtacgcgggcgtcgtgtcgacgggatcgatcttcccgactgttttgaagctcgccggcgtctcgccggcggacaactggcccagcgctttcgggcttcttccggacgccggcccgacggcgggaatcgccccggaggaggaagccgccgtttctgaatacgaacttcccctctccgagctcggggcgcttgccgagctgcccggcgcggatgcctccgccttcagcctcagccagaaggcggttcagacggattcctggaagctggtctcccgctcggacggacgatcctttctttataacctggccgcggatcccggagaggaaatccccttggatccccgttcctcgccccagggggcgcggctcgagcgtcttctcgagcattggcgggcgggccttcatatcccgcatttttcacccgaaccccccggcccgacggccgatgaaaaaacgcgggaaacgctgagatcgcttgggtatctgcgctgatcgacgtctctcgcgaaacgggatgttttatccggccggaagccgccgaggggcctccggcgccatcgtcgtctaaggcgccggaagcgggtcgtccgtctccatctcgattttttcgaggaccagctccatcccgtgaacgatctcgaggtcggtggaggcgcaggcggggcaggccagggcgaagtcttcccggacggtttcgtcgccgcaggcacggcagcggatggtaaacggcggcttgacgatggtcaaaaccgctccgtcggcgatcgtccccttcttatacgagtcgaacgcgctttcgagaagctcgggaaccactccggccagggccccgacctggatcctcactccggtgatgcggcgggccttatgaaggcgggcttgttcgaggagggtctcgaacatcgaggccaccagagaaagctcatgcacgggaggcgatctcctcccgggcgcggaaaagaaagtcgacaagatcgtccagcccctggccgctgacggccgagatgatgaacacccggagcttcggattgagggccaaggcttcggcctgggccttctccgcgtcgaaaggaaggaaggggcgaaggtcggacttggagaggaggaggacatcggccgtgacgaaggccagaggatattttttcggcttgtcgtctccctcgggggcggaaagaagaaccatgcggagccgttctccaagatcgtaaccggccgggcaaacgagattgccgacgttttcgatgaacaagaagtcgatgtcggtcgggatgtccggcagaaccttgccgatcatcttcgcctcgagatggcaggcgccgcccgtggtgatctgccacgccgggattccccgggctcggatccgctcggcgtcgcgctcggtctcgatatcgccctcgatcaccgccatccgggcccgtcccttgagccgctcggccagcgcctcgagcaacgtggttttcccggctccgggcgagctgaggagattgacggccagaatcttccgggattcgagctcccggcggatggccgcggcggtttgggcgttggacaggaggatgtcttggaggacgaagacgtctttcttggccatgggattcgctttcggccctattatacccgcattattcaaaaaaccttttgaattctagtggatttcttcgtttttgaaaatcgttgcatttcccggatgaaatccctatcatgaaaaaaaagggattttccgcccgaggggcggagcggcgtcggatacgaaatgtttaaaaaactttggacacggctcggattccttccccggaaacgggtcagcgtcatcatccccgtcctcaacgaggaaaaaaccatcggccaagtcgtccggctggcgaagaaggacaagaccgtcggggaagtgatcgtcgtcgacgacaactcggtcgaccagaccgtcgccgaggcggaaaaaagcggcgccgccgtgattaaaagctccgttctgggcaagggctattccatgggggaagggctggatctggcgaaattcgaggtcgtcgtctttctcgacggggacatcggcaattacgagaccgacatcgtccgccggctgtccgaaccggtgatccgggactggtgcgatttcgccaaggggaccttccgccgcgaggccggccgggtgacggagctcgtggccaagccgctcctgagcattctcttccccgatctgtccggctattcccagccgttgagcgggatgatcgcggccaagaaggaattcctgaagggcttgaaattcgagaacgactacggcgtggatatcggcatcctgatcgacgtccacaaccggggcgcccggatcatggaagtcgacctcggacggatcgacaataaatccaaaccctggcaggccctggggaagatgtcccgggaggtttcaaaggcgatcctgaagcgggccgagatcaagaagatcctgagcctggacgagttggaaaccatcaacgtcatccgcgacgagatggaggactcgatcaacgactccatccagaagctgaacaagatgatcttgttcgatatggacgacaccctcctcctggagcggttcatcaacaaagccgccgacgcgttcggcttccgggccaagctcgaggagatccgggcgaacaacagcgagccgttcgtggtgacgaagctgatcgccgccctcctcaaggacgtgaagctggaagagattttcgagatcgccgacggcctccagatcgtgccggacgcggccgaggtgatcaaaatcctgaaatccaggggatatgtcgtcggcctcgttacggacagctacgacctgatcgccgacttcatccggaacaaggtcggggccgatttcgccctggccaaccagctcgaggttaaaaaccggacggtcaccggggaagtccggatcccgtcttatttcatccgcggcgaaaagagcccctgctctcacgccgtctgcaaggtcaacgccttggtttatctttcggagaaacacggcctcacgacggccgacatgatcgccgtcggcgacagcgtcaacgacctctgcatggtcaaggccgcgggaatcggggtcgccttctgctcaaagaacgggttgttgaacgtgatcgcggataaagtgatttccacccggtctttccgggaccttttggatcttaccgcgtgatcgtccgggccggaccggcgaattcccagaatagccgttccgcttcgtccaaatgccgtccggcttcggccgaaagccgctcgacgaagccccactccgccccgccgatgcggagaagacgggccgccggggatccgccgtacagttcctcggccagggccaggaccgaggccggggacatctcgtggctggtgaaggcgatcgaagccgccgggtccagggggagaagctcggccggggccgccgcgtcgacggccgcgtcggcgaaaacgacgcggccgtattcccgaagaagggaagcgtcctcgatattaagctggtatgtccagtaggcgtcgaccgatccgccggcggcggggatgacggtcctctccggcgggcggtttcccgtcaaccgctcgacgagggccgggccgagtccgtcatctccccggccgggattgccgatcccgataagaagcgtcttcaccgcgccttgcggtcgatcaggtttccgcccgcgtcgtaaagctcgacggccaggggcatccggccgagcgcgtgggtggcgcaggacagacagggatcataggcccggatcgcgatctcaacccggttgagcatgccctcggtgatatcccttttcccgctgaggacgttcatggccacccagtggacggcccggttcatgggctcgttgttgttggtcgtcgagacgatcaggttggccatggagatttgatcgttttcgtccacccggtagtggtggaacagcgtcccccggggggcttccacgaggcccactccctcgccccgtttcctgcctttgcggacgagttcggttttctgcaggtccgggtcgaggaggagctcccggatgacttcgccgctgtggagaagctcgatcagccgggcccaatgcatatggagggacatgttgttgggcttgccgccggtatacgcccggaaggcctcgaactgcttctgggcccgcggcgtcgggatgaagtcgcagacgttgagccgggctaggggcccgacccggtaccagccttcagccttgccgagggatttcaggtaggggaacttcatgtaggaccaggtccggacttcctcggcgatatatttcaggtagtcccggtagtcgacgtcgtcgaggattcgttttcccccggcgtccacggcccgcatcgccccatggtagaaatcgagggcgccgtcccggccgacgaggccgaggtgattcgaaggaaaggcggcgaagccgtccatgagggcccggtttttggcgtggtagtccttgaggaactcgacggcctcctcggcccaatcgatcatcgtctcgatggcgggggcgccggctccttgaagaagggcgtcccgctcctcgatggacaggttcttgttgattccgccgggaacggccccggttccgtggattttctttccggccgtggccaggatgacttcctggccgtacttccgaagcagcacggcccgggtggccagctccttattcgtcagagcgatgccgatgacgttgcggacggccggatcggcgtcggctccaaagagcaggtcgggcgcggccaggtggaaaaagtgaagcgcgtgggactggaacatctgtccgtaatgcatgagccgccgcatcttttcggccgtgggcgagagaccgtcggcctccacgccgatgacctggtccatcgccttggccgcggccaagtgatggctgacggggcagatgccgcagagccgctggacgaggaccggcgcttcccagtacggccggccctggacgaagcgctcgaagccgcggaactcgacgatgtgaagccggctcgaagcgacgttgttccggtcgtcgaggcggatcgtgaccttgccgtggccttcgactcgggtgacgggttcgatgacgattttgcgcgccatggtgttcctctcagtcgaacttgacgaggttgtagctcagatcgagcggcttgccctcgagcagcgaggtcagggccttccagatcaagtcggccgaaggggggcagcccggaaggaaggcgtcgatcttcacgatttcatgaaggggaaggactttgtccaggatgatcggtaggtcttcgtcgccgggcatgattttcggctcggacggatcgatcgtcggcgagtggaaataggcttcctccaggcattcgcggaccgggatggcgttccgcatcgccggaagaccgcccatgatggcgcattccccgagagaaatcaggacctggcagtgctttcggaactcgcggagcacttcgacgttttcgctgttgcagcatccgccctcgatgatcccgatgtccacgggtttggtgaatgtcttgatgtcgtcgatgggggatttgttgaactcgacgaggtcgatgagagtgagaatccgctcgtcgatgtccaaaaaagacatgtggcagccgaagcatccggccagcgaggccgtggcgacgacggatttgctcatggaattctcctcagccgcgggctttttcgacgtcgctgccgattggttccttgtcgtacttccgccggccgatggggacggcgaagccgacttccttcttcaggatggagccgaccgggcaccggtccatggcctgccgggcctgtttgtccgtcaaggcggaggccaggacttggtccacggagatttttttgtcgcgggaacgacgcagcgtcccaaagacggccttgttgtcccgggtccggacgccgcggacgcagcgaaggcatttgatgcagcggttatgctcgagaaggatctttttcccggcgggttcgacgcggcgggccgggaactggaaaggaaaccgggggacgagcatcaaaaagcggtacgccagggcttgaagctcgcagttgccgcttttttcgcaggtcgggcacatgtggttgccctcgacgaagagcatctcgatcagggccttccgcatgtcctggaggtccgggacgtcgttttcgacagccatcccgtccgtcaccggctgggtgcaggcggccatgtagcggccgccgacgcggacggtgcagacgcggcaggcgccggccggcttaaatccctcccagcggcagagggccgggatgtagatcccgttgtctttggccgcctgaagaatggtctggccgggcgccgccgagcatttcttgccgtcgacggtgaatgaaatccgagctttgggcttactcatgggattgctccgtgtccgaagcggcgaaaacctggccggtgacggccgacgcttccttgacggcttcggccagatcgaattcgggcaggaagtagcggccccgctcgactttggattcgtacatctcccggaagttctggatggtggtcaggatcgggttgggcgaggtctgtccgaggccgcaccggctcatggctttgatgatccggccccaggattcgatttcgatgatatccgccggggttcccttgcccgacatgatcttttcgagcttgcgcaggaggagagggttgcccgcccgacacgggacgcaccagccgcaggactcctcgacgaagaactccatgaaattgcggatgacttcgaaaagatcccggcctggcccgatgacgatgatcgaccctcccgtggccaaatcctcgaaggcgatcgcccgttccaattgtccccgggagatgcaagcgcccgaaggaccgccgatctgaacagcctgggcgtcggggcctccggccatttcgagaagccggcgaacggtcaggccgaacggcacttcatagacgccgggcttcttgcagtcgcccgacacgctcagaaccttggttccggccgaacggggcgttcccatcgccttgaaccagtccgctcccttctcgatgatgcgggcggccgcgcacagcgtttccacgttgttgaccgtggtcggctggaacaggaagccggattggacggggaagggaggccggtcgcgcggttcgccccgttcgccttgggcggattggaggagagctgattcctcgccgcagacataggctccggccccgagcttgatctcgatgtcgaaggagaagcccgccttgccggcgatccttttccccaggagatttttcttgcggagcccggccaggaggctttcaagatacggcgcgaggtaggcgtattcgccccggaggtagaggaggcctttccgggccccgaccgcgtagccggccacggtcatgccctcgaacaagagatgggggcgctcggtcaggatgacccggtccttgaatgtcccgggttcgccttcgtcggcgttgcagacgacgtagtgattctctcccttttcccgccggcagaactcccatttcaatcccgtcgggaatcccgcccccccgcggcccagcaggttggctttcttgacttcggcgatgacgccctcgggcgtgattttcaccgctttcttgacggccgcgccggaccggaaggaagcgaggatgaccgggccttccttgcggatgttgtttttgaccatcgcgcggacgagcttggcggcgttggccccatcccccgtcgcggcgatcatcgcccggacgttcatgcccgcgttcatcccttcgacgatcagcttcaccttggccggcgtcaatttcgtgaacacaacgccgttgatgagagccgcgggctcctgatcattcatcccgatgcaggaggtccggtaaagcccgatccggccgtcgggcgttgtttcaccgaaccggcatccggccgctttttcaaaagccgaggcgacggccgcccggcccttcatgaccgagacgatgttgtcgttgagataaacggcgtaggtcccggcgggacgggcggaaaagaaatgatagaacgtggccgccccttcgacctccaccgtggagagccccaggccggcggcgatttcggccgcggcttcgggcgaaatatgcccgtttttagcctgaacttcccggaggatgtcgatcaagcgggtccggtcccggcggtgacgggcgagaatggaagcgagggatccttctgccggcatgagaacctctcctgcgaaaggattcttaaaacaggaagcttttttataacacaatcatccgccgggctcaatcggcgtttttgttttgaagggggcttgccttttcttcgtcaaatgggctagaattcgaagtagtgttcttattatatcgtccgacaggaggaggaggaatgaagaagaacggcttaatcatcctggtgatttgcctggctgtcatcgcggctcaaagctgcaaatcccatccggaagaagccttgttgaagagttacttcagcgccagctccatgaacgatgtcgcgacgatgtcgtcgatggcgttcgatccgatgaaaatcgacgccgtcagctggaagatcgtccaggtcagcgaggaaaaagtcactccggccgcgctggcggagatgaatcagaaagagctcgacctgaaaaagcagttcgaggccagttcggggcccgcccttgacgcccaagacgcgctgaatatggcgaaagacgagtacacggccgcccggacgcccgccgcccgggccgctgccaagaaaaaacaagaagcggcccagctcaaatacgatgaggcgtacaaggccaaccgggatttggtgaaagcgtacaacgatgccaaggaagcggccgcgcgggaagaagagaaaatggccttctcgctcgggatcaaggatttggtcaacatccgcgagctgaaaggcgatgtcgcgtccaaggatatccaggtggaagtccaaacaaaggacggccagaccaagaacctcaagatccacatggaaaaatacacgatgaaggatgaggcggccggcttggctcatcgcgggcgctgggtcctcacgaagttcgagaacctctgagttaaagcctctttgtaacgagctccatccccctgttccgtcggggacagggggatttccgtttccagagcggattttcttgactctcccgggggattcggctataaatatgcgtctcttcggcgggccgatagctcagctggtagagcaccgcccttttaaggcgggtgtcgcgggttcgaatcccgctcggctcataatgctttgcgcccctgtcgtctagaggcccaggacaccgccctttcacggcagcaacacgggttcgaatcccgtcgggggcgtattcctgttaaaaaaatctcaaaggaagcctctcgccaggcccggccgtcccggcggttcttccccttcctcgccgctcgaccgtgttttccgcgccggttaagactcctccggcggcggaggatttttctgtccggcccgatcttccgtccgccctcgcttccagagggcatagacggcgacggcgggtatctggtaaacggcgaaaatcaccggggcgaggacgatccagaacgcgttcatccggggaagaatgaggaagaggaacccgatgattccggccagggacagccctgcggccgtgacgatcaagaaaacggacacgcccttgcgcatttattcaaagacgaacttcttttccaggaagaggcgaagacaatggtcgacgacctcccggtcgtactggacgccgcggccgcgctgtatttcttctagcgccttttcgatgcccggggccggccggtaggggcggtgcgaggacatggcctcgacgacgtcggcgacgctgatgatccgggcttcgagcagaatcgcttctgccttgaggcggttcgggtagcccgatccgtccagccgttcgtgatgctggtatatgatctgggagatcggccaggggaattcgatgttcttgaggatgtcgtacccgacctgagggtgggtgcggatgatcgacatctcgatgtcgctcagccggccgggcttgcttaaaatttcggccggaacgtagatctttccgatgtcatggatgtcgccggccatgcggacgccctcgatccgggcgggatccagtcccatttcctcggcgatcgcgcaggacagcttgctgacccggcgctggtggccggccgtgtacgggtcgcgcatttcgatggtcaggccgatcgcctggatggttccggccagggctttttgatggcggagatagctttgccggagctcgtcctcggctttcttccggctccggatatcccggaagatgtaaacggagccgaagacatcctttttctccccaaaaatgggggagaccgattgttcgatcgggatggagattccgtcccgcatggtcagcaccccctcgccggccgccgtctccggggcgtccgaagccggatccggggcgatggggatctggatgaagccgtccaacgaccgttgaagaacctccgcctggctccatcccgtgagtctttcggctactccgttcatgaacgtgacgcggccgtccgcgtcggtcacgatcaccccgtccccgatggatcgaaggatcgtcgtgagccactgctcgcgctcgcgcagcttcttttccatctgggccttgtaaaaggccatttcgatcgtcgtctgaagctcccgttcgtcgaacggcttgaggatgtatccgaacggctcggtcaccttggcccgctgcagcgtcgcttcgtcggcgaacgccgtgagatagacgaccgggatggacagcgtttcccagatgcggtgggcggcttcgatgccgtcgatccgccctttcaggacgatatccatgagaatgatatcggggcgcgttttttcggcgatgaggatcgcgtcctcgccggtggatacgaccgccggaacggagtagccgagaccccgcaccatgttgacgatgtctttggcgacgaggctttcgtcttcgacgacggcgatctggagatttttcatggactcacgccggcgttgattttcaggttttcggccagattcgccaaggatttttggagcagggtttcaggatcctgtccggtccggtcggtcatcgccaggccgtagaaaacgaggaccggcacggcccggccctcgtggtcgaccggatcatcgaaaacgcccaggatccggcgggcggcgatccgcgactgctcctcggtttccaagtcggggagaagaatgatgaattctccgctttccatccgggccagcgtgtcgctcttgcggagaatgcgcgtgagccgttccgtcacctcggggacgatgtcgtgcaggccgggcgccggggctccggcggagccgccggccgggaggacaacaaaggacaggatggcgattcttttatggtggcggtcgccgaggtaaatcgctttgcttaaatggtccaggaagagaaacttgttcggcaggccggacagacggtcgtggatggcccagaaagcggcctggcgctctttttcatacttgtaaaaagccagctcgatgaccgttttgagctcgcggaattcgaacggcttgagcaggtatcctaagggatcggagctcttggcccgggcgagggttagatcatcggcgtgagccgtcaggtagatgaaggggatcgaccattcctccttgatgatgttggcggcctggatgccatcgatcggtcccttgagccggatatccaggaggatgaggtcgggagcgcggttgcggatcacggcgagggcgtcttccgccgtcgatacgatcgccgcgacttcgtaacccagctcgatcagcatgttgctgatatcgtgggcgacgagaaattcgtcttcgacgatgaggattctggctttggccacgactctcctccccgcagaattttataccatccccggggggggatgtcaaaagaacgcccccgacgtccctttccggcgccgccggcttttcctggagaccgggcgttttccccgactttttgcccggcagccgccgtttccgggtcttggagcccccctcctcggtccggcatgaataatgtgcgggggggaggatgggcggtgcaggattcgaacccgcggccaccggcgtgtaagaccgatgctctaccggctgagctaaccgcccgttccgtccgttgattatacatcattttcctcttctcccgtggcgggccgatgaatccggcaagagtgtttcggacgatcaggtctcctcaaattcaattgaagacggcatttttccaccctttgcgggagagacctctcgagacggggatatgcctggccgctcccggtcaggcggggccgtccgcgccggattttgccggacgccgcgttccgagggaagtcttttccccgggaaagaaaagccgtttgacataaacgcaagcccatgttaaagttatgctcctttttgcggatttttgacttcaattcgaggaaaactaccatgtttgcagtcattaaaaccggcgggaaacagtatgtcgtcaaggaaggcgatgagctgcatgtcgaaaagctcgccacgggcgccggaggatccgttcttttcgaagaagtcctcctgatcgatgacggggaaaacacccttgtcggagcgccggttgtcgggaaggcggtcgtgaaggcggatgtcctggagacgctccgggatgataaagtgattgtttttaaaaagaaacgccgtaaacaataccgtcggacccgggggcatcgtcaattcctggccaagattcggattgcccggatttaccccgatcggacggttgttccggccgaagagctggctgtcgtcgcggccccgatcgttgtctccgagtccgtcgagcccaaggccaagcccaaaaccaaggcgaaagctgaaaagccggcgcccaagacggccgagggaaaaccggccgccgtgaagccggcggccaagaagcccgcggccgataaggccgccaagcccgcgaaacccaagaaaaccgccgagaccggtaaaccgaaatcccgcgccaagaaagcggagaagtaaaggagacgatccatggccacaaaacgaggaagcggagtcgggcggaacggccgggacagcgcgggccggcggctcggcgtgaaaaaatacggcggcgagatggtcaaggcgggatcgatcctggtccggcagcgcgggactccgttcaagcccggccccaacgtgggccgcgggcaggacgacaccctttacgccaagatttccggcgtggtccggttttccgataagggcgagaggggcaaaattgtctcggtccaccccgtttaacgttcatcggctctatctcgattcctcgttttccgtgaggcgggggatgtcttttctctaaaccgttcatgttcatcgaccaggtcaaggtttatttgaaagccggccggggaggcgacggcgcggtcagcttccggcgcgagaagggcgtcccgaagggaggccccgatggcggtcacggcggtcacggcggccatgttcttttggtggcggaaaaaaatctggcgaccctggcgtattaccgattccatccggtcaaccgggcgaagaacggcgaacctggagcgcgggcccgcaaacaggggaaacggggggcgaacctcgagcttcgtgttcccgtcggaaccgtcgtcaaggacgccgtgacgggaaggatcctgtgcgacctgattgaacccggccagggatatatcgccgccaagggaggcaagggcgggcgcggcaacacttccttcgccacatccacccatcaggccccgcgggagcacgagcccggccgtccgggcgaggagcgggagttgatcctcgagctcaagatgatcgccgacgtggggctgatcggattccccaatgtcgggaaatccaccctgatttcgaaaatctccgcggcccgcccggtcatcgccgactatcccttcacgacgctgattccgaatctcggggtcgtggatgtccgaaccggacggagcttcatcgtcgccgacatccccggcttgatcgaaggggcccatcgcggccaagggctgggcattcagtttctcaagcacgtcgagcgcacccggattctcgtccacttgatcgatgtttcgccctattccggccgcgatccgatcgaggattattggatcgtccggaaggaaatcgcggcctttgacccggccctggccgcccggccgcagtacatcgcggccaacaagatcgacctgctccgcgaggaagacgccggccgcctggcggcggtcaagaaactcgccgcagccgaaaaatgccggttcttcgccgtctcggcgatgaagaaagaggggctggaccggcttgtccgagccctggacgaagcggtcgcccgcctggaggcggagtcctccgcgtcccgaggaaatcaaaggtgacctccgctcggcgagtcggaatcttcggggggaccttcgatcccgtccataacggccatcttcaggcggccgcggccgttcgatcgcgcttcaaactggaccgcgtgcttttcattccctcgcgcattccgccgcacaagcgccgttccgatatggctccggccgccgcccgcctggcaatggtcgaggccgccgtccgggggacgaagggattcagcgccagccctttggaggtccgttcgccgcgaacgtcctactcgatccataccctggcgaaaatccggaagcagatgccggccgcccggctgtttttcatcctgggagccgacgcctttggcgagatcaagacctggcgggaatggcgccgcgtgctcggccaatgcattttcatcgtcacgacccggccgggaaccagcctccgggcggcccgggcggtcctgatgcccgaatacgcggtccgcatggccgcggttcggaagacgagcgatatcgaggctctcctccgggccggccgatcgatttttttccttaggatccaggccctggcggtatcctcctcggacatccgtcggcgggtcggagaaggacggccgatcgagagcctggttccggccggagtggccgcccttatccgctccggcaatctctatcggggacaaaaaaatgaccaaaccgaaaaaaacatcagccaaagccgtcgcggcggcgaaaaccgcaaaattaacgcggaggctgctgccgcccgccctgaaagcggcgatcgaagcgtccttaaacaagaaagcggaggacgtcgtcgtcctcgacctcagggccgcggtcacgttcactgaatttttcctgatcatgaccgggctgaacgtccgtcaaacgggggccctggccgaggtgatcgaacacgacctcaaggccatgaatcttcggccgatcgggatggagggcgcggcccggggagaatggatcctgatggattacgggtggttcatcgttcatatcttctcccccgcttcccgggactattatgccctggagcggctctggagcgatgcgcccagcttgatggtctgaggcgtctttcgccggggagaggcaaaagggatgcggatccggattctttggccgggaaggacgaaaacggcggcggtccgcgcgctggaggacttttatctgaagcgtctcgccggtttgttgccctgcgaaatcgtcgtcaccgaggcttcccggggcctggacgagaaggaaaccgaaaaaatcttggaaattgaggcccgggggcttgaaaaacggcttaaagatgattatattgtctgcctatccgacaaagggagagagatgaattccgaagatttcggccgtttcatcgagaaacgagcggtctctggaacgaaatcgctggcctttgtcgtgggcgggtttctgggtttggcgccccggatcctggaccgggccgatctccggatgtcgctgtccaagatgaccctgtcccacgagctctgccgcgcggttttgctggagcagatctaccgcggcgcatcactcatgaaaggaagatcttatgccaagtaaagggagcgtcgtgaacaagaaagagctggaagccgtcaagaaaacccttgaaacgcggcggggcgaaatcatcaggaagcttagcgaagcccaaaaccagagtaaaatcatcgaaaccgacatcgcccaggatctggccgacaaggccgaaagctcctatacgaaggaattcctcctcagcctgtccaacgccgagcgcggggagctccttcagatcgatgccgccctcaaaagaatcgcccggggcgaatacgggctctgcctgagctgccagaaggagatcggcaaaaaacgcctccatcatattccttggacctccttctgcatcgagtgccaggaaaagagcgaagctgaaacagcctgattttggcccaggcgccgcttttttcgaaaatcggccgactggccgagctcgcgttctttccttcgttctgcaaaatatgcggccggcttttggaaaagcccggcgagcggatcctttgccgggattgtctggagcgaatcgagctttcccgttctccgaaatgtcccttttgcggaaagctgtacgagggggccggagaaagccatgcctgcggcgcctgcgcggcgtccccgccgtctttcagccggcaccgttcggccggccgctaccggggcgttctcaaggatgtccttttactcctgaagtacgggaaatgccggccgctggcccccatcctcggaaaagcgatccacgaatccctccggagggacggggagctgtggcgggatgtcgatctgatcgttccggttccgctttataagaaacgccgccgggagcggggattcaatcaatccgcggatatcgcccgggacatcgggcggcggaccggaatcccggtcgcccacaaggtcctccaaaagatccggagcacgccgccgcagacgtccctggagcgccgcgaccggattgagaatgtccgcggcgcctatgccgtcggccggaaacgcgcggtcgaggggagaatcgttctcctggtcgacgatgtctacacgacgggctcgacgctgggggaatgcgcccgcgtcctcagaggagcgggggcggccgaggtgagggccgtgaccgtcgcccaggcttgaaacggcggagaaaaaaaaatgacggggctttcgccccgtcatttttacggcggaggaggggatccgtcgttactttttcgatttttcagaaggcttgagaatcttgaccgtcttcggcttgagttcctgccgtttgggcatgaccacccggagaacgccgttttcgtgctcggcttgaatgcggtcggcatcgatcgagttgggcagggagaaagcccggaagaacgagccgtaggatctttcaatccggtggaagttctcctccttggtctccttctcgaacttgcgttcgcccttgagggtcagggtgttgtcctcgaccttgatttcgatgtctttctcgtcgatgccgggcacttccgcggtcagaacgagctcgttgccggtctcatagatatcgacggccggcgaccagttgctcgtgaacatgtctctctcctctcccttttgggacagagagtcgtcgaaaagccggttcattttttccctcagcgtcatcatgtcgcgaaagggatcccatctgatgatagccatattgaacctcctgattaatttttcgttatcggccttataagcggccaagtccaatataatatctaagcggtatattgtcaagtaatattaaaaaatttatttaattattatttacattataaataattgataattaataaaataaagtctctatgtttctgctgttcggaaatattttttaaaaaagaaaaaaattcgaaaattccagcttcagccggaacgatccgaaccggcttcccttcttccggctccgtggatgagaatcgtaacttctcctttgaattcgcgccttttggcgatttcaaggagctcggccggggttccccggaggaattcttcgtggatcttcgtcatttcccgggcgatgacgacaagacggtccgcgaaatccgccggaagggtttctagaaaaagctcgattttccgggccgggagatagaagatgaccgttccttcttcttcccggatcgacaggagcgttttacgcaaggcttcccgcttgggaggcgcgaagcccatgaaaagaaaccggtgcgtcggcaggccggacgcggccaaagccgcgatcacggccgccgggccgggaacaggaacgacggggatttggaggcggaccgcctcccggacaaggcggaaacctggatcggaaactcccggcgtgccggcgtccgtcaccagggcgaccgactttccggattgaagaagatcgagcaggcggggaatccgctgcttttcccggtactcgtagaagctgatcaggcttttcctcaggtcgtacttgttgagcagcttgagggtctggcgggtgtcttcgcaggcgacgagatccgcttcccggaggacgcggatcgcccgaaacgtgatgtcttccaggtttccgattggcgtggcgacgagatagagcgtcccgatcacggctcaacggccccgttcaaggggataaagaaaatcgtgtccgatcgtccggtgggaaagcttgacgatcgggggcatctgccttttgaactccgaccggcggatgaggccggtgattttctcaacctgctttttggggaagccgcgggccgcgacttcggccgcggtttcccggccttcgaccaagagttcgagaatctcgtcgaggacatcgtacgtcaggccgatttcctcctcgtccgtctgaccggcccaaagcccggccgtcggcgccttcgtccggatgcgctccggcaggcccaggtgaagggccagctctcgaacctgagtcttatacaagtcgcccaacggattgacggcgcaggctaagtcgccgtggatcgtcccgtagccgatgagaagctcgctcttgttgctcgttcccaggataagcgccttttcccgggccgaccagtcgtagaggatggacatccgctcgcgggccatcttatttcccttgaggagaaggtcgccgctcgggtgtctcttgaagtaggcgtcgaccatcggggcgatgtcgatcgttcgggcgtcgattttcaatcgccgggccgtgtcccgggcgtcctcaagatccgggccgaatccgcggccgtagggcatgatcaaggcgatcgtatttttcgggccgagcgcccgggcggccaagacggcgcagacggccgaatccagcccccccgacaagccgagaatcccttttttgaagccgcgcttggccagctccccgcggataaagccggtcaggatcttttcgacgaagagagcgttaatgcgcatcgcgatggatcatcctttcgaggttggccaaggtgatgtccggacggtcgtcgcgtttgagggtcagggcttggcgggccttgcggacggcggcgggatcgagatcagccaggagaagatgcggctcgaaatagggggcctgggcgacgcgccggccgaaaggatcgtagacgaatgaacctccggcgaagaccgctccgtcctcgatcccgacccggttgcaataaacgacgaaggaggtggtgacccgggagacggtttccccgatcccttcccacatccggcaggaggtgaatccgttctcttcgccgacgccccggccaggggcggcgctgacggcgagaatgatctcggctccgtcggcgaacaggagataatgcgcgttgagatggaggaaatcgcggcagatcagaaggcccgcccggccccagggcgttggaaaggagcggaaggtccgtcccggagcgaaaaagcgcatttcttcgaacatgccggaattgggcaggaaaacctttcggtagacatggaggagggatcccttgtgaagaaaggcggcggagttataaaacaaccccttttccaggggcgactcttcgacgaatcccacgaccagggccacagcgcggctggcctcgcgcagggaggcgaatgtccgggaggagcgagggtccaaggcggtttcggcgacgagatcgcgcagccgatagccgctcagactcagctctggaaaaacgaggagatcggccccggcccggcgggctttggcggagagctcgaggtgggagtcgaggttccgggggatatctcccaaaaccggcgaatactgggccagggcgattttcatgtcttcaaattagcataaatccgtggacgggccaaattttgatattttccttgttttcgttaaaataagctcagtgaaccatatcgctctccacctcaaagacgtttacttcggtaaaaagacagggaagcttgcgttttctcgcacgggcatcgaaaaagccttcttctttcaggatgggggcctgatccacgcccagaccaacgtctcggaggagcggctcggggaaatccttttgcggacggggaagatctcggccgaagcgttcgctggaatcggccgcttcgtccggccggacatgctcctgggcgaggtcctggttcagaaccgggtcatctcgcagaggggcctttatgacggcgtcctggcccagatgtacgccgtcattctgggatgcttcgtctttttcgacgccacctactcttttgacccgcgggaacgttacttggacgcggattttcagcttcgagtcaaccttccgctcctgatcgaaaaaggcgtccgggcgatgtctttccacccggcgatccattccttctttttcggcaaggctctcgtcgccaaggagggcgagctcctttcgagcatcgacgagaaagagcgggccctctggcatcggctcgacggatcggtcaacatcgaatacatcatgacgtgggacgcgtccgatcccaactggttctggaaaaccctttttctgctgtattgccttgacctggtggaattcaagagcattcccgagccggccatgattgccgagcccgcggttgaggcgccgccggccgcggcggctccgtcttttccattttccgacgaaccgctcctctccgccgagccggccgtgcccgcggaaccgcccaagccgccggaaccgcccaaatccgtgaaaccccctaaggccgcggaagaagcggccgataaggcctcccaggagctcgatgaagccatttatgaggcggtcgagcttcgcaagcgcatggccaagctcgaccaccatcaattgttcgggttgtatccgtcagcgagcgaggccgaagtcaagaaagcttatttcgccttggcccggaaattccatcccgaccggttcggtcgaaccctcgatccccagatcaaaaagcagatcgatgaacttttcgaccgcatcaccaagtcttacaaggcgctgacgacagccaacggcgccgccgccgaggtcgaatccgccccgccggccgacgagaccgaccgggatcccggtcggagcgcggatacgaggttccggcaggggaaaaccctgtacaaccaagcccgctacgatgaagcggtccagtacctcgaggaagccgtccggatgaacgacaacaagggcgattattttcttctcttagccctggcccaatcgaagatccgcggtttaagcaagaaagcggagaagaattttctccgggcggtcgagctggagccttggaatccggaaggaatcgtcggtttgggcatcctttacaagaaggaaggcctcaacacccgggcaaaaagacaatttgaacgggcccttgaaatcgagcccggtcatcaagccgcccggcaggagttggaatcgatgggcggcgggaccgaggataagaaaggtaagagcctctttacctccgacatttttgggcctaagaaaaaacgataaaaccggccggaaccgccccctcttctaatcccggaggaaggcgtccaattccttttcggttaggaccggaacgccgagcttgcgggccttctcgagcttcgatcccgcctcggctccggcgataagataggttgttttcttcgagatcgaatccgtgaccgcggctccccgggcttcgagggccgcccgggcttcttcccgtgtgtatcctttgagcgttccggtcaggacgaatgtttttccggtcagcggccggtcgccggccggcgccttccgttccgatcggacattcacccccgccgccctgagctttttcagaagatcgagattttccggctggcggaaaaaaaagaccaggctttcggcgaccacggggccgacatcttcgatcaggcggagctcctcttccgaggcggcggccagggcgtccatgtcggcataccgttcggccagcgtccgggcggttttttcccccacgtgccggatgccgagggcgaagatcagccgcccgagatcgttggccttcgatttttcgatttcctcgacgaggttttgggagcttttcggacccatgcgttccaaggcggccagggtttccgctcgaagcgcgaagagatcggggagggaagcgacgaggtttttttcaagcagctggtcgaccagcgcctcgcccagcccctcgatgttcatcgcccgccgtccggcgaagtggaggagcgattcccggagcttggccgggcaggagggattctcgcagcgggcgacgacctcttcctccgcccgatggacgcgggatccgcaaaccggacagcggcccggcgggacgaactccttttccgagcccgtgcgacgctccttcatcgggccgacgatccgggggatgacgtcgccgcttctttcgaccagaacgatgtcgccgatccggatgtccttgcggcggatctcatcctcgttgtgaagagtcgcccgggagacggtcgtcccggagattttcaccggatccaggacggcgacgggagtgagggctccggttcggccgacctggacgatgatctcccggagacgggtcgcggcctgacgcgccgggaacttgaaggaaacggctccgcggggaaatttcgccgtgaatcccagctcccggcgctgctcttcgtcgtccaccttgatgacgacgccgtcggcgtcgtaatccagcgtttcgcgccggtcggtccattcccgccagaaggcgatgaccgcggccgcgtcgggacagcgccgtgaatggggattggtcttgaagccgagggccccaatcaactccagctcctcccactgagaagccggttcctttccctcgatcgtcaggtaataaaggaacatgtcgaggcggcgggcggcgacgatccggggatcaaggaggcggatggagccggcggccgcgttgcgcggattggcgaagagaggctcctcgcgggcctcccgggaccggttgatttcctggaaggaggcgaacggaaggtagatttccccccgaacctcgacctcccgccgttcggggatggtcagcggcaaggttcggatcgtccgggcgttggcggtcacgtcgtcgccttggattccgtctccccgggtcacggcttggatcaagcgcccgtcccgataaaggagagagacgctcaggccgtcgattttcagctcggcgacgtaggagatcgtccggccggggagaaggcggaggaggcggctttcgaattcctcgaattcctcgacggaatacacgttgtccaagctgagcatcggggtgcggtgccggacggagggaaagccttcgaccggttgtccgccgacccgctgggtcggcgattccgggacgatgagttcgggatgcgcttcttccaggagccggagctccctcatcatggcatcgaattccgcgtcggaaatctggggatcgttgtcctggtagtacttcttttcgtgataagcgattttcttcctgaggcggtcgatcgccgcggcggcggagcggtccatgcccttcattttagcgaaatcgcccctctaaagaaaatccccctcggctccctccgttcctttcggatcggggaaggcgagggggatggccggaccgtccgtcggcccggggcttacttgccgacgcgctttttcgccgacgccacgagggcgtcgaacttgctcgatccggctttcatctgggcgacgaggttgttgaccgcaaccgtttccttgtcgatcaattccttgagcttgcggaattcccgccgctcgtcgggagtcaggtcctcctcgcttttatcgccgtacttggagttgatggcatcggtccattccttgatgagggcctggctctcgtcgatcatcttgatccggtcgttccattccttgtcctggccgaagaacaaggaacgggcgatgtcggtgcactgcttcgaccgtttcgtgtcaagaaagctggcgtcgagaagaaaagcgacggcatcgttgaccagggccgggttcgttttggcctcgttggccagcatgatcccgatgttataagccatggatcccgtcttgttcttcgcgtacatgtccttgaacatttgaagggcttcggcttccttgccctgcttgttgaggatctgggccagaatcgtcatgctgtcggcgtccaggcccgttccggccaggtagcggaagatgggctcggcctgggcatatttctgcgcatcgtaatagccctttccgattttcttgagctcgccgagaacggccggggacttgagggtcgtataagcatggttgaaggagtcgatggcccccttgatgtcgccggctttttcctgggccttggccgtcaggacgtacgcctggccgatcgtctgagtccacatcttggcgttggccgcttccccctctttccccttggccgcgttggcgtgttgaatggcctgctgggcggccgctttggccttgtcgaactggttcgttttgagatggatatcggccacgatctggtacatggcgcccttcatctgatcgtcgatcttgccgctggcggccgccttttccgccaagccgatcgtttcggcgttgtactgcttggactggtattggatgatggcgaggttggcgtaggcgtagctgtcgtactggttgccctggccggaaaacttggagatgtattccttaagcagccgggctttctccgccggggcggacgcttgcatggccttgatgtagaactggtccgcctcgctctgggcgaaggcgatggcgcccgcgatcattgaaaatacgacggccgttaacagcatccttttcatggaggacctcacaaaaaatttttttagcatcatagtcccctttttccgtgatgtcaacaacttggttcaacgaaacctcttcttcgtcttctatatgcaaatcgcgtgccaaaaatccagcgaccgatccggcggcacggcttcgcccggcctcgaaggacaacggctccgggaacgaaaacgaggacgcgaggtgcgcgggccggacggactctccggccgttgcggcttgtctctttcattgcatcgagctccggcccgggatacaatgcgcctgatggttgatatcgcccgattgatcgaggaaaaaaccggccggcgcccctcggccgggatccggctggaaagcctgtcgaattttcggatcgggggcccggccgatcactatttcgaggcggccgcggccgacgagctccggacggttgttgagttggcctccggctccggatatcggcattacgtgatcgggggcggattcaatcttctgttcgacgacgccggctaccgcggtttgatcatccgggtggcatgccgcggattcatcttcgaaccgaaatcctcccgcttgattgcccaagcggggacgcctctttccgatctcacgggatactgccgcgaccgcggcctcggaggcctggaattcctggccggcatccccggaaccgtggggggggcggtttacggcaacgcgggggcgttcggctgctcgatcggcgatgtcctggaggaagccgatcttctggatcccggcggaaaggaacggataaaggcccgcccggcggatttatcgttcgcctaccgggattcccgcctcaaaaaaacccgggaaatcctcctgtccgcggctttccgggcggttccggccgataaaacgaaaatcgggacctgtatggattcctatatcgccttacggacggagcgtcatccctcgcgggatacggcttatgccggaagctttttcaagaatcccttgagctccgagggaacgcggctggccgcgggcaagctgctcgaacaagtcggagccaaggagacgacggtcggcggggcggccgtcttccacggccatgcgaattttctctataatcgcggcggggcgacggccgccgatgtccgcaagctggccgacctcctcaaggagcgggtgatggatcgtttcggcatccggctggaggaggaggttattttccttccagcagagcccggagccgtttgacccgagcgtccggaatcccccgtttcttcaccaattccagggccgccaagccgatggtccggtacgcgtcccgggcccgggggacccggcgaagcgcccgcatctgccgggcgaccgtttcataatcgagccgggccagggggccggtcagggcgttttcggcgtcaaggattttaacgtttcgtaaagttccttcgaccaggggcaggagggcttttttcgcggtcggggcgggaatgccggcctcggccatggtctcgaccgcgagtccgaacagcgggacgaacaggttcgaggcgagaacgcacgccgcgtggtacaggattttttgtccggcggtgagaagaaggggccgaccgcccagactgcgaacgaggattttcgctttcctcacggccgccggatcgccctcgaggccgaaaatcacgccccgcgcgtgcgaggccggcgtcgagggcgtcggaaacgattgggccggatgcatcgagccgaccgcggcgctccgtttcgccaagggggcgaggatggcggcgggcgcggctccgcttgtatggaggagcgttttgccccgcccgtcccattccccggcttggaggactgaggccagcccggccagcgcgtcgtccggcacggcgatgaggatgacctccgcggagcggagggcggcgaccggatcccgaaacacccggccgcggccgatgatcctccgcgccctccgggcagccgccggatcggcgtcggccaggccggcgatttcatatccggcttgggccagggagtttcccagcgaggtccccacccgcccggttccgatgacggcgattttcatgcgtgttttttccgggcgaaagcctcggcccaaagctgaacgtccagggcggacgagcgttcctcggttttctccatctcccgcgcctcccggccccggcggagtgtggctttcagctcccggacgaagtcatcgcagctgacgtccgcggctcccgcctcccgggcgacggcccggatttcccggtcggagctgacgaccgacaagtgacggcggtcgcgatgccgttcgatgtagtccacgatgacggcgtcggccgactcgcccggcggcgggaataagacggcgaacttctccttcccgggatcgacgaagccgggcggagcgcatccgtcgaaaacgagaacgacccggctccgggtcaggcgttgaaaggcgcgaagcttgcccacgagcgccgcccggtgggcaggatcccgatgatatccggcgtaaaggcggcccagcagattgttgccgtcgatgagataagccatgttatccgggcggccagtgcattttccggccgccgaagagatgaaagtggagatggaagacgtcttggccggaatccggcccggtgttgagcacaacccgataaccgccggctttgacctccttggccgcggcgatggccgggatcttggacaggatgtgctgaaggagatccatccggccggccggcacctcgttgagagaggcgaaatgatcccgagggatgatcagggtgtgcaccggcgcttggggccggatgtcgtcgaaggcgacgatccggtcatcctcgtagacgatcttggccggaagctccttggaggcgatccggcagaaaatgcaatctcttttcacggcggccctccttggtccttgcggacgtccccttgggagtcactccttgatgcgctcgatccgtgctccgagctggcggagcttggcttcgatggcttcgtacccgcggtcgatgtgttcgacctcgttgacgacggtttcgcctccggcgatgagaccggccaggagaagaccggccgatgcccgaaggtccgaagcgatcacttccgctccggacagccgcgacggtccccggacgatcgccttgtcgccgctgacttcgatggatgctcccagccggaggagctcgttgacgtgctggaagcggcggtcgaaaatcgtttccgtgatgatcgaggttcccgaagcctgggtcagaaggaccatgaattgggcctgcatgtccgtgggaaatcccgggtacggcgacgtcgtgatgtcctcgggatggatttcagcggatccgacgacccggattttgccggtttcgggagtttcgatccgggctccgcaataacgcagcttctcgatggtcgtgaccaggtgatcggggcggacgcggtcgaggatgatgtcgccgcgcgtcaaagctccggcgaccatgtacgttccggcctcgatccggtcgggaatgatctcgtggaccgctccgccgagggagtcgacgccggtgacccgcatcgtttcttcgccgatgccgtcgattttcgcgcccatcttgacgagaagctcgcagaggttctggacctcgggctcgcgggcgcaattgcgtagaatcgtttcgccccgggccagggaagcggccatgacgatgttttccgttccgccgacggtgtttttctcgaagtggatgtcggcgccctgaagacgaggggcttcggctttgatgtacccgtgctccagggtgatggacgcccccagcttgtgaaggccggtcatgtgcaggtcgatcggccgggagccgatggcgcagccgcccggcagggcgacgatcgccttgccgaagcgggcgaccagcgggccgaggacgagaatggaagcccgcatcaccttgaccagatcataggaggcttcctcccggtgaatcctcggaacctgcatttcgaggacgttttcccgcaggtcgccttcggccccgagctcgccgaggagggtcatcatggagtagacgtcccggacaagcgggacgttctccagccggattttgttctcggtcagcaaggcggcggcgatcgccggaagcacggcgttcttcgacccggaaacgcggacgcttccccggagagggaggtcggggcctcctcggattcggattttttccattgtcggcgttccttcagagccgtttcagggcttggtccaagtcggcgatcacgtcggccggatcctcggctccgacgcacaaccgaatgagctggggaggaacgtcggccatgcgccgggcttcctcgccctgctgttggtgggtggaaatagccgggatcgtggcgacgctcttgatccgcccgaggtcggtggcccggtagatcatcttgaagccgtcgtaaaccttgcgggcgttttccggagggccgtccacccggaagcccatgagatggccgtaccggttgacttcccgccccgttccatcgtcggaatccacaagcgtcatgtatttcttggccagagggtggagagggtgggagggaaggccgaggtagtcgacctggtagattttcggatggccggagagccactcggccacttgctggcaattccggctgaccaggtccatccgcgagcgcagggttcgtaattcgttcaaggccatcatggcgttgaacggggcggcggccgggccgttgtcccgatagggaaggaacttcacgtactcggcgtagctgtccttgaaaagcgggtggtcgttggagaccttggtcgtaatcggcttgcggctgatcaaagccccgccgacggccgttccgctcatggtgatggatttcgtcatggaatgaacgacgatgtcggccccgtgggccaggggccgcatcagggccggcgtggcgcaggtggcgtcgacgatgaaggggatgccccacttgtgggccaggtcggcgaccgcccggaggtcgcagaacgactgctggggattgctcggagcttccatgtaaaggaaccgggtgttttcatccaccttggcggcccagtcctcgatgtggtggggcttgcagacccagcgggcttccaagcctctctcctggcccttgcgcaggttgaagagctggaacgtgcctccgtagacctggatggaggagacgaaattgatcttttcgctgttatttttccgtacgagcaggggatcgacggccatggagatggcgcccatcccagaggccgtgaccaagcacgacgcgtccaccccggccttgtagctttcgaggagggccatcgtccattcgaggtagtaggtggtcggattggcgatccgggagtagcaccacgtgggaatcagataggccagggcggcttcgagctcgtcggcgtcccggtaatgctgggaatccgagaggaagagcggctcgatgaccgcgccttggttgcggacataggattcttcgagcgagtagaggccgtgaacggcgacggtgtcgaacttccattgcttggcccgggcgatcaagccgtttcgttcggcgatgagcttttgcgcttcgaccacgtacttcatgactcccggtccgtatgagggtgtgtcgggcatgcggtctcctcccataagcatattgccggctccggcccggccgaagccccgtcttcttcccctcatcatacccgaatgccgttctcgaatcaaaacaggtgcggagacggccttggtcccgccggggacatggtataatccccttccccggatccgggaaggagggcgatgtgagcaaagcgagggtggcgatcatccggacccggcccgagagcgtcctggacgatatcgtccgggcgtttgagctggccggcggcccgcaggccttgaaaagcggcctgccgacgattctcaaggacaacatcagctggcattacccctttccctcggccaacacgactccctggcagcttgaggggacgattctcgccctccgcaagcacggattctccgatctcgtctgcgttcagaacaagaccgaggtcaccgacgccttcaagggagaggacttgaacggctacaagcccgtcttccgggcccatgatgtcgaggtccggttcaatttcaaggatgaagacatggcctgggtgcctttcaagccgcgggcgaggatgcgggccctggatgcgatctacggccgctcgctccggatccccgatttcttcattgggcggaacatcgtccacctgccgacggtcaagtgccacatctacacgaccacgaccggagcgatgaagaacgccttcggcggacttctgaaccacaagcgccaccagacccacacccgtattcatgaaaccctggtcgatctcctggcgatccaaaaggaaatccaccccgggattttctgcctcatggacgggacgacggccggcaacggcccgggcccgcgggttatggagcctgtccgcaaggacgtttttttggccggggcggaccaggtcgcgatcgacgcggccgcggcccggctgatgggcttcgacccgctcggcattccgtacatcaggatggcccacgaggacggcctcggcgtcggggatccgcgggacatcgagatcgtcggggacgaggccgcgggagcggaacagtggggattccaagtcggcctttgcttccacaagttcgccggctggctgacttggttcggaccgacccgcttcatgcagaaggtcctcacccggccgccggttctttatttcgcgaatttctattccttcttctatcatgatatcctccactggaagctcaaggaggggcccctgtaccgccgttggctggaggaatccgactggggccgcctgttcacccgctatcggagagaaggggccttgaggccgggctgagacggcgggcggcgcgggagacgcgatgcgattgatttcaaaatccaagtacctggccggtcttcaatgcccgaagctgttttggacgtactataaaaagccggaggcggttccgccgcccgacgcggccacccaggcgatcttcgaccagggacacgaagtcggcgccctggccaagacgctgttcccgggggggatggaaatcgagggggagccgtggaagttcgcggacttgatggcccggacgcgggaggccatgaaaaaacgagttcctctctatgaggcggcgtttggagcccgacacgccttcgccagggcggacatactcgttcccgtcgaaagcgaggcctgggatatcgtcgaggtcaagagcggaaccgaggtcaagccggtcaatatcctcgacctttcgctgcagcggttcgcggccgaaagcagcggcttgaagatccggaagtgctttctgatgcatatcgacaacacgtacgtccgtcggggtccggtcgaggcggaccggctgttcgcccgggaggacgtgaccgcggccgtcgccggagaaatgaagaacgtcgaggcgaacctgcgctcgatgctcgccctgctcgagcgggactcctccccggacgcgccgatcggcccccattgcgacgatcccttcctctgtcccctccatgacgcctgctgggcgttccttccggttgacaatccgctgagggtcaacggattcagcaaggaggccgcttttcatctcattcgcgggggcatcttgaaaatcggcgacatgccggtgatcgagagaaaggatgcggctgaagacagcgccggatcccccggcctcgcggcttccttgaagatcgggaaaaagcaaatgatccagatcgaggcggcccggacagggctcccgttcgtcaaaaccgcggagctccgaaaatttttggaacagctcgcctatccgcgctcctatctcgacttcgagacgtttcaaaccgccgtgccggcgtatgacgggacgcgcccgtatcagcaagtgccgtttcaattttccctccacatcgtcgcggcccccgaggccgatccggagcatcattcctatctcgccgccggggacgtcgacccgcggccggaattcctggaccggcttcgaggctgtttgggagagttcggcccggtcatctgctataacgccgctttcgagcgcggaatcgtggaagaggcggtcgcggccgcgccggcctttaaggcttggtggaaaaaaacggagaagaggttcgtcgatctccttgttccgttccggaccttcgccttctatcatcccgcccagatcggaagcgcctcgctgaaggccgttctgccggccgtgaccggcggccccggctatgagggtttggaaatctgcgacggcagccgggccgcttgggagtatcggcggatcacgttcggacgggtcgagccggacgagagagctcgagtccggaaacagctcgaggaatactgcggcttggacacggaggcgatgatccgtgtcgtcgccgccctggagcaggaagccgggaggggacggggggaatcctcaagctgaacgccgccgccgtcgaggacggcgcttcttccgcccgcttgccgctcgtcctggttttcattatcatgatcccatcattccaaggaaggtgtggcatgaatagaatgatgatatccctcctgctggccggcggaatcgttttttccgccggcgccgccggcccggcgcccgccggcgggctcaaggtcttcatctcggtcgacatggaaggcgtcagcggcctgatcaactgggaagagacctcggcgtccggccgggattacgagctcttccggcgggcgatgaccgaggacgccaacgcggccatcgacggcgcgctccgggcgggggcgacggacatcgtcgtccgggacgcccacggctcggcccgcaacatcgtgccggatctcctgcggcccgaggcccggctcctccgggattggtcgggcggcccgatgagcatgatggaaggcatcgacgatacgttcgatgccgtattctttatcgggtatcacgcccgggccgggacgccgaacgccgtcctcgatcatacgaacatttcctcccggctgctgggcgtcgtcatcaacgggatcgagatgcccgaagccggaatcaacggtctgatggccgggatgttcggcgttcccgttgttctcgtctccggggatcaggccatcgccgcccaagcccgggagctgttcggcgacgtggaaaccgccgtcgtcaaggaagcgatcgccaacgccgagctcggcctgcacccgtccaaagcccgggcgctgatcacggaaaaagcggcggccgctctcaagcggctgaaggatttcaaaccgtacaagctcccgccgccttataccctggacgtctccttcatcctggagtcggaagcccagaacgcgtcctggattccgggcgcggtccgcaaggatgcccgcaccgtgagctttgcgaccggcactctcatggatctttttaagatcttccgcgtgtccaaaatgtaacggagggtcgaaagcgacggcgcggaaccgcgcccaaaaaagcggagataaaaaaagggccgctccccgcgcggggagcggccctttcggtaaaggtcgttcaggccgtcaaaccaagctcggggtcgaacccggagcggccgaggcggccttgatctgggcttccacccagtcggtcgtgacggacttcgggcgttcaagcggcaagccgagagcccggctccagatgagctgggagaggatgccgagggcccggctgacgccgaagaacacggtgtagaaatcgtattccgtgacgccgtagtacatcaggagaacgccggagtgggcgtcgacgttcggccacgggtttttggccttgccgtgcttcgtaaggatgtccggggcgaccttgtaaatcgagctgacgaccttgaacaagtcgtagtcgggaaggtgcttgagggcgaattcacgctgggcgacataccggggatcggtcttgcggaggacggcgtggccgtaacccgggatgaccttcccgccgttcagggtggcccagaggtacttggtcagctgttcctcgttgggcacgccgccgaggtctttcatgacgtccatgatccagcggagcacttcctggttggccaagccgtggagcgggccggccaggccgttcatggccgccgacaggcagtagtaggcgtccgacagggccgagccgacgagatggccggtatgggccgaaacgttgccgccctcgtgatcgctatggatgtcgaggtacagccgcatcaggtcgtagaaatcagacttgtcgttgccgagctgatgggccaggttggccgcccagtcgagcttcggattcggggcgatgtacttgccgcccttgtaggaccgcgtgtagatgcgggcggcgatctcgggcagcttggcgaggatgtccatgacatcctcgaacatcggatcccaataatcttttttattcatgccggcccggtactgagcggcgaatttgctgtctttctgaagggccaggatggccagggagaactgggtcatcgggtgcatttcgacgggcagggattcgagcaccttgacgagataatcggggagcttggcccgtttcttccactcctcgccgacggccaaggcatcctcgagggtcgggatgtcgccggtcaggagaaaatagaagaggccttccggaaggggctcttccgtgccgggcagcttgggcagcttggcctgcagatcgggaatcgtgagcccgcggaagcggattccctcgttgggatcgagagccgaaacttcccagaccatgcatttgacgctgcgcatccctccgtaggcctgggcgatcgtgcaatcggcgatcttcatgtcgccgtgctccttgaggatcttttgaatcctctctcgcatgggaagcattttccccgcgaatttctccttcagagtcgtcgccattcgataagcctcctttttatgaaatggctgcggtgatcatcccgaaaacaatctcgggagaatagcgattttatccggaaaaataaagtaagtcaacgaaaaagagcgggcaggggggagggaaaatgccggaagcgctccgtcatcccgtacttttttctattgctttttcgaaggggcggtcctattctttagaggaacacttcgaaaggagaaaacgagatgggtgctttgttcgttttcctggtcatcctcgccgcggtcgttctctacgcgatcggggtttacaacagcctggtgaccctccgcaaccgctgcgataattcctgggcccaggtcgatgtccagcttaagcgccggtacgacttgatccccaacctggtcgaaacggtcaagggctacgccaagcacgagcgcgaggttttcgagagagtgacccaggcccggaacgcggccatcgccgccaccggagtcaaggacctgggagcggccgagaacgtgctgagcggcgctttgaaatccctctttgccgtggccgaagcctatcccgagctcaaagccaatcagaatttcctcctgctccaggaggagctggccgggacggaaagcaagatcgcttacgcccggcagttctacaatgacgtggtcatgaaattcaacacgagacaacaagtctttccggccaacatcatcgccgggatgttccagttcaagctcaaggaatatttcgagatcgaagaaccggcggccaaggagccggtgaaggtccagttctgaattcaggataaggcctgaaacggaggcccggccgtcccggcggttgccgggacgcccccttccgcgccggaggcggccattgtatgaacatatctcgagcaacaagcggcgctcgtttctcctgattattgttttcattgccgtcattcttctcctgggctgggtgttcgagcggctgaccggaatgggggaggggggattgattttagccgccctcatcgcggggggatcggccctgacgagctattacgccggggataagatcgccttggccgtcagccatgcccgtccggtcgccaaggaggagtttccttacctgttcaacgtcgtcgaggggctggccatcgccgccggcctgtccgcgccccgctgctatgtcatcgacgacacggcgcccaacgccttcgccgcgggacgcgatccgtctcattccgtcctctgcgtgacgacggggttgcttcagaagctcaaccgggtcgagctcgagggcgtcatttcccatgaaatggcccatatcaagaattatgacgtccgcctccagacgctggccgtggtgatggtcggggtggtcgttctcctgggcgactggatcatgcggtcgctgtggtggggaggacgaagccggaaaatcagcggcgaccgggccggcgtcggggccatctttctcatcatcgggctgttcttcgccgctttcgggccgcttgtcgcccagctgctccggctggccgtttcccgccgccgggaattcctggccgacgcgtcgggagcgatgatgacccgttacccggccggcctggcctcggccctgcggaagatatcggccgacgcggagccgctcgagtcggccaacaaggccaccgcccatatgtacatcgtcaatccgctgaaaaacctcaaggggagcctcaaccggctgttcagtacccatccgccggtcgaggagcggatcgcggccctggaaaatatgtagcccgggtcgccgatccggcttggcgggttcccatcccgccgccgggggaggggcgtcgccgttttttgatggaatcttgtttcgactcggtcgattcgaaatgcgcccggcgggcgaacggagagggattccggcttatgatttccttgaatatcaaggtgatatgagacaccccttgaaaaatcgtccaagcccggctataattttccggcctcctaggcggggccgtagttcagttggttagaacgctggcctgtcacgtcagaggtcgcgagttcaagtctcgtcggccccgccaatcatacccccgacggcgccttcctgtttcggggcccctcctgtttctcaggaggggaaggggaggtaaatacgataagattaaggtcttaagggcggtgtcggaattaaaataattccgttttgatcgtgcagtcgtgttccccccttattctaaggggggcgtcggggggataatatcgataaagaaagaaggaagcggtttgggccggtgccgacggcgccttcctgtttctaaccttctctttcgcgccgcccgcttcgccttgtcggttgcagggcgggcggcgggccggccggctcgcgcttatcataacaagccgcatcgccgtcgtttcctcggagtcgacgcgaatttcagccggtttccgcggatgaaaaccttcctaaaaagatacgtaacttattgaaaacacatgttgacatcgaaataaaagaggaatatgttgagagacaaatcagggcgctcatcgccttgttgaggggggctcgaatgccgccttcggaaaagggtcaagggccgttttttctttcaatcattctttttcttttccaaaatccatgaagagcatgaagaggaggaagagatgaaaaagggaatggggacatgtttttttcttttggtttttatggcgggtttctgcttggccgagaggatggctcccatcgccgtctcccccggccttccaggtaaaaccgcagtcatcaaggggggcagcccgacattcagttggacggcggtctcctgggctcccgcctacaaagtggccgtttttgaagcaatgggcgaaaacgccctcccttatgagagcatggccgttttagctccggccgtcctcgttaaggagatcccggggcgggctttgtcctggacgccgacggcggatgagcgattggccgacggcggaacctatgtttggtatgtcggggcgacggccggcgtccaggtctgttggtcggagggatgccgtttcatcgtcctggaggagcccctctggggcgttgtagcggaggcgcgggacgggctggctggagactctcaggccgggaccggcttctccgagggaaaaccggatcaggcggcggaaacaaacaacagatccggcttggcaaacgagtccgggaacgatgtcttggggatggaagggccgatgaacacgttttatggattggccgccggcgtggcgaccaccgggatatataacagcttttttgggcgcgccgccggattcatgaacgtgacgggatatgacaatacattcatggggcatgccgcgggatacagcaacggcggaaatgataatacgttcgtggggaacgtcgccggacggaataacacggggggatatgataacacgtttgtcggcagctgggccggccaaaaaaacacaaccggatacaaaaacacgttcgtgggccgaggcgccggccagacaaacggcgcgaactcgacgtatatcggtcatgacaacacgtttcttggcttcaaggccggaaccgccaatacggtcggaagatacaacgtctttgccggcgcctcggccggacaagccaatatcaacggcgtgtgcaacgcctttttcggctggaattccggaagtgccaatacgaccggttccaataatacgaacgtcggcgtcaattccggacgggccaacacgaccggctatcaaaacacgtacgtcggcgcgaacgccggatattacaatgtcaccggttacggcaacacgtttgtcgggtccgaggccggttataataataccgcgggcaaggaaaacgtttttctcggcgattggtctgggcatgacaatgccgggagccggaatgtcttcgtcggcaacgaggcggggatgtcctgcgcatccgggagccggaacgtctttatcggcaaccgggccggttattacgaaacgggttccaacaagctctatgtcgcgaacgacaacggaccgctgggccttctcatctatggagatttcagcggcaagctgctgagcctctgcggaaatgtcgcgattcaaacccagggcgcttcgccgacgcatttgctggatgtcggaatcggcggggcctactgcgacggcacgacttgggtggacggttccagccgcgagttcaaggagaacatcgtcgccttggcctcggaggaagcaatgcaagccttcgaggctctcgagccggtgaagttcaactacaaggcgaacccagaggaaacccgcctgggtttcatcgccgaggacgtccccgccctggtggcgacaaacggccggaaaggcctgtcggcgatggacgtggtcgcgatgctgaccaagatcgtccaggaacagatgaagaccgtccgggagcaaaaggacgaaatcgaggcgctcaagcggaaaatcgaaaagctggagaacggatcccgaatgaagtgatgaattcaaatcccataaaggaggggttgatgaaaacgaggcgaacaatcctgtcggttttcgtggtcctggctctgatcgccggcctgtccgcggctggcctcggggcccgaaacaacgggacggcgggcaagccgtccggttgcgtgacgatccccatggggatcgtcctctactctccggggcattatcttgcgggacaccccctcgctccgggatacgatgtgttcggatacaacttccaggcccgcatgttcagcggttcctatgccaatgcctatttgggaggctacggcttccctccctacgagggggacgacgccgcctacttggcggaaaaccccgcggcggccggcgtttggtgttggccgtaccgcgaagacaacctgatcatgaaatggaacgaggcttggctctccaccaaggactgcgacggcgacggcaagctcgaccggcatttcggctttccttcctacaaaggatcgggcgcttggctgacgaaccatcagtccggcgtgtatcccggcggcgatggcagggaatacagctggaattatttctgcaaaatcgtggccgttccggctgacgcggtcaagacgaacggcgtctggcacacggccggcggcgtcgagatcggtcccgacatctggggcgaattcgccgtcatccaggaagtgtacaacgacaacggaacgggggatcacggcctcctctataaaagcccggccggtcccggtttcggcaaatgggacgaggttccccaatgaaatgagggcgttagcggatttttaaggggggtttttcttgacttcccgccctcccgcccctatactgagagtgtcccaaaatctttggaaagggggcgtatggattcgacggagataatgaggcgaaagaggcatgccgagatcccatctctctcgttaaacggtggaacccaagtaagtgcagaaacacttcctctcgctgcttaattagttaggcggccgttccccggacccgctcccaccgggtccccggagcgccaacccgtgggatagcgagccgggccggccttgagcccggggagcgaaacaacatcgaggctggccgagcggccccttcctcttcgggaaccgcgaggcgagatgaaagaagaggataagcatgtagactcttcccgctgaatgtcttcggacgcgggttcgattcccgccgcctccaccacctcttctctggtttcgggcgttgtttcttgttaaaatgcgggcgggatgagaaatatgaaatctcgaccgccgatcgtttctggaaatttcaggccttcttctcccgtcttccccgcgcttgtcgtcctgtccgccttgcttttcgccgcttccggaaccggtttttccgccgctccggtcgcggccctgcgcaatatcgtcatcgatccgggccacggcgggctcgacgtcggagccaagggccggttcgggacccatgagaaggatgtcaccctggccgtgagcctcaagctcaaggctttgattgaaaaaaccatgtcctaccgcgtcatcatgacccgggacaaggatctcgacgtctcccttgaaaaccgggcggccgtggccaacaacaacgacgcccagctcttcatcagcatccacgccaacggatcggtccggaacaaggcccgcggcgcggagacgttcttcatgaacgtcaacgcctcggacgaggagacgcggaggctggcctacctcgaaaacacgagcggcgagctggacaaaaaaattccggccgaggcccaggacgaagtcaaaatgatcctttgggatatggcccagacggcctatatccggcagagccagcggctggccgaaatgatccaggaggagatcaacgcggccctcaagctcgagaaccggggaatcaaacaagccggcttcaaggttctccagggagtggcctgtccggccgtcctggtcgagatggccttcatctcgaatcccgaggaggagcggaagctcaacgacgaattctttcaggatcaccttgccgaggctcttcaccgggggctcgtccgctacctgaagctctatccccggaaataacccgccgatggccaaatccgctcgttccatcctgattctggttttagccgcggccgtggccggactggccctcattttcttcatgagcggcaaccgggaatccctcaaaaaaatccggccggccgagggcccggcggccgaggaagagacgatgccggaggattcgcggccgaaacggacggtgcggctcctctttgtcgacgaggaacgcgaatccctgattcccgaggaaagggagatcgtcgccgacgccgccgccccggccttcgaggcccgccagatcatccaggagctcatccggggatcccggacggggcttctttcccccatcccgcccgaaaccaagcttattcaagtctatgtggccaaggacgggaccgcttatgtcgatttttcccgcgagttcgccgaccggcatccgtccggatcgagcgccgagatcgcgacgatctacgccgtcgtcgattccctcgcgatcaatttgaaatccgtccggaaggtctgtctcctggtcgacggcgaggaacgggagacgctggccgggcacatcgccatcagtcgtccgatcccccccgatttctccaagatcgccggagattgaccggaaggcgccggccatgtccgttgaaacgagatcccttccccgtgtcgtgatcgtcggctatcccaacgccggcaaatcgacgctcttcaaccgccttctcggccgaaaaaaagcgctggtccattcgctgcccgggatgacccgggatttcatcgccggcgaagcccgcctgggagaacgccggatcgaactcgtggacacgggcggctttctcgattccccggccgagcccttttccgtcgaggtcaaggccaaggcttgggccgcggcgaagtcggccgacgtcgtcattcttctcctggacggacagcggggccttctgccggtcgaggaggacttgctccggtcgctccggaagctgggccggccgtttgtcgtggcggtcaacaagatcgacacggacgcggcgagaccggagctggccgaatattaccggctgggcgcgccgcgtcttctgttcgtatcggccgagcacaagcgcggcctcggcgccctggaagaagccgtcgcctccctcctcccgccgccgcgggaaggggaggaggacgccggcccccggccgctgcggatcgccgtgatcggccggaccaacgtcggaaaatcctccctggtcaaccggctctgcggggaggagagggccatcgtcagcgaaatccccggaacgacccgggacagcacggacgttttgatccgtcgaggctcgaaatcctatcttcttgtcgacacggccggcatccgccggttcggcaaggtcgccgacgagcgggaaagcgccggcgtgatcaaggcccggaaaaacattcccttggccgacgtcctctgcctggtcctggatgtgaccgagttcccggcccggcaggacgggacggtcgccgccctcgccctggattcagggaaaccgctgatcatcgtcctgaacaaatgggacctggtccacgaggaggacgtggtcatggaggaggtcgagcgggcgctttggagccggcttgatttcgtgaattacgctcctttgattccggtttccgccctgaccggtcggcacgtgacccggatcctggaggaggctgagcgcgttttccgcaacggccggaagatgatcggcacggccgttctcaacaagttcgtcgccgtcctgaattccgaacatcccccgatgacccggcgggggcggcggttctcgatcaagtacatgactcaaaaaaccgtcctgccgccgaccttcgcggccttcgccagtgtccgggagcccatggccccggcctatgaaaaatatctgatccagaggatgcggcgggaattcgggttcgagggaagccccatccggattcttctccgcggcccaaagctgaaaggatagccctccgccgaaccgatggctgcttcgccgctcggacggcggaggagaaacggcttccgccctcgggcggggcggcggaagcccggtttttcggttttattcccgcccccggaaaacccccgtgatttgactttccgggcgtctttgtttataaagggagtctattcccatcaagggactgctgtcccaggaggtcaagatgtcgaggattcgcgcgtcgcgcataatcattggactctttgccgtggcgatcgtcgtttccactgtggcttgccagaagctgaacgtcaacaatctgcgggccaattattacttcaacaagggaaacgctctgttcaatgaaaagaagtatccgaaggccatcgaagagtatgaacaagcggtcaagttcaatcccaacttgaaggaagcgttccggtacatcggcgaaagctacaagatgatctacgctccgggcaaggattcggatgacaacaagctgcggggggccaaagccctcaatgccctggtcaaggcctatgaaatcgacccggacaacaaggaaatcatctactcgctgggggacatgtacgacaagcttcatgatatccccagcgcggagaagatgttcctccggatcatcgagctcgatccgggcaacatgaacaactattacatcgcggccgagttctacaagcgttacgccggcgagaacgccgatctcaagacgaaggccgagcagatgtatcttcgccgcatcgaaaccgatcccgacgcggtccagggctatgcttatatggccaactactacgacaacctgccgacggccgatttcaaggataaattcgaccgggccctggactatcaccagaaacgcctgagcatcgagccccaaaacgccgaggttctctacacgatcggcgtcaaccggttcaacaaagcgtatcagctccagaattttctgtccgacttcgaaaaagccgaagtggccggcgaagccgagcaggctcttctcaaggcgatcgagatcgatccgaccttcgccaattccttcgcctacatgaagatgctctatatcaacattcatgccaaagttttccccgaaaaagagagccgctacctggccgaagccgaccgctacggcgaaaagttcaaagaggcccaggctcgggcgatcgaacggatgaagctggaaaaagagcttaaaaagtaagcgttttcgcctgttccaggacatcccgccctcctctccggctccgtcggggaggagggttttttttcattgacatctgaacccggaaatagtatcttattgcatcattttattttagcgaaacctggagtcagagtttccatatctcttgttgaggttcagccgatgaagacttatgtcccaaaaaaggatgccatcgaacgcaagtggtgggtggtcgacgccgaaggcaaagtcctgggacgtttggccacgcaggtcgccgttcttcttcgcggaaaagcgaagccgcagtatgccccgttcgtcgacaccggcgattttgtcattgtcgtcaacgccgaaaaaatcgccgtgaccggccggaagacggagcttaagaaataccatcgtcattccgggtatccgggcggcatcaaaaccgaggttctcaaggacctcttggcgaaaaaacccgaggaagtcattaagaaagccgtctgggggatgattccgaagaacaccctcgggcgcgcggtatacaagaagctcaaggtttaccggggacccgaacatccccacgccgcgcagaatccccaggaataccggttctaaaacgaggaggccgacgcagtgagtctcattcagtattacggcacaggcaagcggaagacatccatcgcccgggtcttcctgcggtccggcaaaggcgatttcaccttgttcgtcaacaaacgcccccgggtgtttgaggattatttccggacggaatcccaccggctgaagatcaagcagccgctggccctgacctcgacggaggacaaattcgacgtcttcatgcgggtcgagggaggcggcgtccacggccaatccgaagccgttcggctggggatcacccgggccctgatcgagtataaccgggagctcaagccggctctgaaggcggccggcctggtcacccgcgattcccgcatcaaggaacgcaagaaatacggcctgctcggcgcccgtaaagccccgcagtaccacaagcgttaacggaggaaaccgtggtctcagtcacgatgaaggaactgttggaggcgggcgtccacttcgggcaccaaaccaagcgctggaatcccaagatgaaggaattcatctacggccagcgcaacggcatctacatcatcgacttgcagaagacgatcaaggtcttcaaggaaagcctggctttcgtcaaaagcgtcgccgagagcggcaaggacatcttgttcgtcggaaccaagaagcaggcccaggatatcgtccgcgatgcggcccagaagtgcgaatcgagctatgtcaaccagcgctggctgggcgggctcctgacgaacttccgggtcatcagcggatcgatcgataagctggtcgagctcgaggagatgcgggaagacggccgctgggatcttctttcgaagaaggaacaatccaagctcgagaaagtctaccgcaagctgagcaagaacttgggcggcatcaagaatttaaagggcattcccggagcgatgttcatcatcgactcctcgcgggaaacgatcgccctcgaagaggcgcggaaaatggcgatcccgatcgtggccatcgtcgacaccaacggcgaccccgacggcctaacgtatcccattcccggcaacgacgacgccgtccgggcgatcgagctgttttccaacaagatcgcggaggccattctcgacgggaagaaagcccggatcgagaaatcgatgctcgaggacaaggccgcggaggaagccgcggccgcggccgaggaaccggcgctcgatctcggttgagtcggcggatgaaccgggcgcgggcccggggttgaaaatcgacaaggagttcacgatggatatcacggcggagatggtcaaggaattgcgcgagcgtaccggcatcgggatgatggagtgcaagcgggctctcgaggaagccggcggcgaccaggaaaaagcgatcgagatcctgcggaaaaagggttatgcccgggctgcggacaaggccgaccgggcgacccgcgagggccggatcggatcctacatccacaccaacggcaagatcggcgtcgtggtcgaagtcaactgtgaaaccgacttcgtcgccaagaatgaggagttccaggagctcgtcaagaacatcgccatgcacatcgccgccgcggcgccgaaatatgtcgccccggccgacgtgccggccgacgtcctcgaaaaggagcgggagatcatccgcgagcagttcaaggattccaaaaaaccggccgagatcgtcgagaaaatcgtcgagggcaagctctccaagttctacgaggaaacctgccttctcgagcagccgtacatccgggacgataagcaaaagatcaaggatctgatcacccagttcatcagcaaattcaaggagaacaccaaggtcggccggttcacccggtaccagatttcgaaataacgggaggaggcatgcccgcgcccaagcccgcctacgaacgcgttctgctcaagctttcgggggagtctctcctgggaaggcaagcctttggaatcgatttccggacgacacaggcgatcgcccaggaaatcaaggaagtccatgctctcggcgtccagatcgcgatcatgatcggcgggggcaacatcttccgcggcgtgaggggagcggccgagggagtggagcgcgtctcggccgaccagatgggcctactggccacgatcatgaacgggatcgccctccaggaggccttggagaagatcggagtgatgacccggcatgtctcagccctggagatccgggccatcgccgagccgttcatccgccgccgggttctccgccatctggaaaagggccgggtcatcatcttcagcgccggtctgggcagcccctatttcacgaccgacaccgcggccgcgctccgggccctggaaatcaaggccggggccatcctcaaagcgaccaaggtcgacggcgtttattcggccgatccgctcaaggatccgaaggccaagcggttcaaccggatccggtatatcgaagtcctcaagaggggtcttgaggtgatggatgccacggcgatctcgctctgcaaggacaacaagcttccgatcatcgttttcagcttgaaaaagcggggcaatatccagcgggtcgtcctgggcgaggacatcgggacgaccgtgtattgaaggaggaggccgtcatggtgaaggatgttctacaggattgcgatcgcaagatgaaggcctccatggagcatttccgcaaggagctcagccgcctccggacgggccgggccaatctcggcgtttttgaggacatcaaggtggattattacggcgttctgacgccggtcaatcagacggcccggatcggtcttcccgatccgaacctgatcacgatcgccccctacgatcaaagcgttttggaggcgatcgacaaggccatccgatcggccgatctcggcttcaatcccatcaacgatggaaagctcctcaagatccccgtccctcccctcgacgaggagcggcggcgggagatcgtcaagaaggtcaagaaaatgctcgaggaggagaaaaccgccctccgcaatctccgccgtgaagccaaggatttcatcgaggagctcgagaaggaaaaggagatcggcgaggacgataaattcaagggcctcgaggagctccagaaaacgatcgacgattacacgaagaaaatcgaggacatcgcggcggccaaagaaaaagaaatcatgcagatctgaattcccggggaatccccatcctcggacggatccgcgctcttcttctccctgatttccgaaggcgtcaaggcggcggggaatttcggtatttccaagatcctcgttcaggattgcttcggcccgggcggcaatggcgcttggggcgcgggggccgcggttttccggaaccagttatccgtcgtcccgaatttcgtccgcaaggcgatgccccaagccaggaggctcaggaaaaacgacagcgctccgccgacgaggggaatgaatcggaggacgccgacgacggccagcccgagaagcgccccgccgatgggggagaccgaggtccggcggaacgcgccggcggtcagccggccggcggtgaagtagactacgatccgtccgaagaccttgatgaggattcccgcaaacgagagggcgatcaggacggggatgccgatcaggatgacgctgagaacggcggcgaagaccatcaggaaaaggaacgcggcggaggcgacgaggccggttaagaggaccgttccgagggagcggcgcatttcgccggcggcccgggtcacgtttccggggaacagaccggcgacgatgaccgcgaggacggcccagagggctaaggagatgatcttgatgatgaggacgatcgggagatacgccgccccgagcagtccgccgacgccgccctggagaaaacgctcccgcagctcctcggatttaaagtagaccgtgtccccttggacgacgcttccttcctcccggacgagcgttccgccgaggatcaggagatccttccggataacggctgtcggcttcagggtcactcgggcgccgacgccgacgaaggaatcgccgacttctccgctgatcgtcacttcgcttcccacggccaggacgtccttgcggactttgccttcgatgttcacggtcccgccccaggtgaagagctgattttgttcgctctgcgggctgatcaggatgtcttttttatagccgatcggcgaattctgcgggaaggccggcaggggaatcaagcccgccgccgcgaggacgatcaagccggcgccgatccgggccaggatcttatttttcatgcgttctctccgaaacggggagtcggcggcgcaggaatacgccgccggaaatcaagatgaccagagttccgccgatgagaacggcccggccgtccggcccgaggatttcggccgtcgatcgcaggaattcgagaactccgcgggagactccgaggatgatttttccgcccaagaagaggagcttcccgcccttggccgcgaaggcggcggcgttgcggagctgggctccgaacgcgggaccgattcgggagagccaggcggccgatccggcaccggcgagaatcatgccgaggccgatccccgcgccggccgcggcggcggccgccgccgtccagacgaggccgggatggagtttcttcgcggccggaacgggaagggcggcgatcccggccatgacgccgacggcgaagtccggaggaacctcaaatggaggaagatccgcggccgctccggcgatccgcccgcggacggcgcgggcgcgccggcaagattcgcaggactggaggtggcgctcgacggcctctttctccgccccggtcagggcgccgtccaggtcatcatacaggcggtcgacggatgggcagctcatggcatctcctcaagcagcccgcgcatcatttccttggcctgaaacacccggtttttcaccgtcccgaccgggagcttcttgatttcggccatctcttcataactcatgccgttgatatgtctccagacgaacagttctttcaaatgaaccggcagccggtccatggccttttccagcctgagccggagctccttgcgctccatctcgaggatgatggacgcggtctcatcggcgacttggagagtgcagccgtcctcggtgtcgtccagcggctgatccagggagatcgcggtgattttcttttttctccaatgatcgatcaaataattggacgcgatccggaacagccaggtcgaaaatttatactgcgaacgatacgacgggagagccgcgtaagcgcggagaaacacttcctggctgacgtccaaggccatctctctctctcggaccatccggctcacgtagttgagcatcggctgctggtatttcaggacgatcgtctcaaacgccttccggtcgccgcgcaggcaccgccggacgagtttgggatcgtcggacccggaggaccttttatcctcaggcatttatacgggctccgagagaaaaagttcagctccgccggggatcgacattgtcaataatctcgcagccgtccgggacctcgatgacaaagacattcggcccgagacgggggttggttttcagtcgggaaaaagtgaattcgttcttgttgccggcccagtcgaataaaacaacccggcggagaaaaaacgtccgggcgtcgatctcgacgaggagataggcggtttccccctcctcgaggggagtcagcttgagttgatgaacgggcccttcggctccggggaagggattgttttcgatccggtaggcgtcggccagcccggtccgtcccgaaagaaggccgaacaacgccccgtcggcttggtcgtcggggatgatctgccggataagctggttttcctcggggataagcgtctccatgacgccgtcgctgagaacgatgatttgcccggacccgctccggtattcccaccgcatccggccgggtttccggtaggacaggcggcccttttcccgaagcggctcggacacggtcatggaaaaatatgcctgttcgaaatcggcttggaaggagttgagggcggccagagcccgttccgaccttaagaagacgtcccgggccgcgtcttcgtccgcccaggcggggaggaggaggccggcgaggcaaaaaacggctcccgcgattgtcctccacaggtcgagccctccgaaattcccttcgcccggtctcatcgtcccggtattataacacggttgatcggccggggatctttctggtataaccctcggcatgcgtccggaatttctaatcctgttcgtcgcttacctcgccctgctcttggccgtcggattgaccttttcccgccggatgaaaagcgccgaggacttttttttcgccgggaggcgtctttcgagcggcctcatctgcgtctccctgaccgcctcctggttcggggcgacctcgattttggtatccgtcgacgaggccttcgccggcggggtgaacgcgatctggatcgtcggcgtcccggcagtggcgacggtccttctcctggccgctttgttcgcttcccgccttcatcgtcttcccgtcttgacgtggtcagacctggtcgagcttcgctacggccgaacggtccggcatctcgcctccgggcttctcgtctggtacatggccatgctggccgcttcccagatgtcggccctggggcttttcctgaaggattttctcggcgtgtcttatgccggggccatcggcgccggcgcggctgtcgtcctgatttatacggcgttgggcggcctgcgctcggtgatctggaccgacgttcttcaattcctgcttctttcggccggcgtcctggcgctctttttccatatccggggggcatcgtcgtggacttcggccgcggtccgggcggcggcggccggaaaaaacgggtatttcaaccttttccatgatttcggcgggaaaggcttgatggccctttcttttaccatggcctggacgatttcgcccatcgctttgcagcggatccgggccgcccggagcgcggccgcggcccggcggggtcttggggcgacggccgcggccctcggcggcttttacctgcttgtcgtcgcgaccggcgttctttcccttcccctttttccggagaggataggcgggacgtccgtccggcctcttgtcgccgatatcgccggcggccggaccggtttcgtcctcggcggcttggtcttcgtcgccatcctggcggcgattctttcgacgatggacacggccgtcaacgccggggctctcgtgttgaaccgagacgtgatcgagcagattcatccccgggctaaacgccggcccgttttctgggggaggacggcgacggtgttgatcgcggccttcgcttttctggtcgccctgaagctccgtaacatcctcaagacgatcgggctgtcgtcggagatcctggctgagggatttttcatccccggggcggcgatgatgtttttaaaagcaaaatatccggcggccgggcttttcagcgtctgcgggggagggggattcgccgttttgagcttcctcgaatcctcgggaatcgtgtctttgggcctgccggcctggccgtactccgtcccctggggcttggccgccggggccgcgggattcgccgcgggtttttgggtcgaccgacggcggccggaccggctggcatgatcgatattgttcaaggccggcgttttcgctaagatgggggacgatgtccgccaagacgaaattccggctgtggctcatccagcacccggggaagttcctgatatggatgtggatgaagacgtgccgctggaagatcgtcggagacggcccgtaccgggccctgaggaagtcggggcggccggtcgttttgctcatttggcatggaaaaatcttcgttgtcccgttctttttccgcaagcgaggaatcctggccctggtcagcccgtcccaagacggggaattcgtcgcccggctgatggacggctggggctacaccctcatccgggggtccggctctcatccgatgaaaaccgcctggatcgagatggtccgggaactgaacgaaggcggcgaggtcatcatcgttcccgacggcccgaaggggcccgaccgacaattcaagccgggggcggtcaagctggccgccgaaaccggcgcggcgatggtccccttttccttttccgcccgccggaaaaagatccttcgcagctgggaccgcttcgagatgttcttcccctttacgcggatcgccgccgtttacggcgagccgattgagattccccgcggcttgccgcccgagagccgggaggaggagcgtctccgggcggaacgtctcatgatcgaattcgacgcccgggtcgaccggtttttcgagagtggggcggagggctaggggcgaacgtccggcggcgaggatttctggaaccgcgaggccgtttccttgttcaacaggatgatgattgaatagatccccagggccgtcccaaacgggacgttgaacaggctcaggaaggagacgacgagggtgaggatccggccccattcgtaccccttcaggaggccgtatccgccgatgatcttcggcaagccgatcaaggccaggaacgaccccaggaagaagccgatgaaacggaggattccgggagcttggggatcgatgtcgggaatgaacgagaccccgaccaaaatcaaaaacaggaagccggcggctacgaggctcagggcgccgaagatgatccagaggatgccgatgattttgatatggtcgttcatggccgttctcctttccagtttcatgtacgaaaaacaacgctccgggttcactcctttgacggaaagctcatggcggaggacgatgatcgcggcgacggcctcagcgatttcatcgatccggggaactggctcatggcggaattccggccgcaagacaagaaatacggttgcgttacatccggccggatcaattccaaccgcatgatcacggcggccgcgggcacggcggccttcgacccgttcggggggatccagaagacccgggtcaatccttatgatccggcattgaaattcccgggcaaggagcgggagccgtccaacgggatggattattccggagcccggcattatccgcctgaccggtatcgctgtctgagcccggacccggtgctcaaccgcgatgcggcccgctccgacccgcagccccggccgctacaaaaatagtaataggattcgtttcgtttaaaagcaaagataatcaccttgtcttaagacacaggttcagcgtcttgacaaacgtccgctcaaaagataaatctgtatcgtttttcatcatggagggaagaaaaatgaagaaattcctgtgcttgtccgttgccctgctgctggccttggccgtctccgccccggcccagaccgccgttgagctcatcaaggccggagatgacgcccgcgaccagagagacgacgcgaaagcgctcgaatcctacctggcggcgctcgagctcgagccggaaaactacgaagcgctctggaaggcgtccggctcgatggtcgacgtcgccgacctggtcaacgtccgggccaagggcggccttgagaagcagaaaaagtattatcaggacgcggcggaatacgcccggaaggcgatcgccgtgaatcccaatgacacgaacggtcatttccagctttcggccgcgctgggaatgtatgccttgggtttgggcaacaaggaaaaaatcgcgatgtcgagggagatcaaggccgagatcgaaaaatccatcgagctcgacccgaacaacgacggcgcgtatcacgccctcggccggtggcatcggacgatcgccgaaatcggcggcgccaagcggctgctggggggcatcctgtacggcaagatgcccaagggaaccaacgaagaagcgctgacgtacctgaaaaaggccgtcgagatcaagcccgacgacatccatcatcatctggagctcggccggacctacgtcgtcgtggaggactacaaggaagcggccgcggaattccggaagtgcgtggacctgcccgaggcgtcgggcaaggacgcgatgtacaaacaggaagcgaaagcggaattaaggaagatccagaataagctgaaataattattcgccgaagacttccgcctcgaagatctcgatccgggcgccttttttccaggcgtcggggggaagcccggccttcaaacagccgtggctgagaaacgtttcccgcttccacccgtactccaccgggacctggggaagaaggaggcccttgcgccctccttgggagacgatgattccgtgacggccgacgaccacgtcctccggcttttccgccgggacgggaagcgtcaggacggagatttcgatgtgaaggtcgtccatctcttcggccgtcacgggctcgaaacgcggatcctcgaaggccgcggccgcggccatttccacgaccgcatcggccagcggcttgagggggagggggtagccgatgcagccccgaagctctccccggcgggtcagggtgacgaacgcgccgcgcttttcggccaggagcgggtcctttgttgtcagggccggcgtcggctctcccgtcaggcgggcggcgatcgattcccgggctaagtggagaaggtcccggcgtttttcgatcgagagagagccgttcatgggcgttttccttccggccggccaaccggccgctcgacgacgacgcggattttcttgaagagaaaccggtcgtggtaatcgatcaacgatccggcggggggccgctttttcccgcccggcaaggggatttcaacaagaaccttgccggttccaaacggccggagaaggggcgcgcgggcggtcgccggcgcgccgatgaggaaaaaaccgacgattttcctccccagtccggcatccatttcataaaaggaccggagcgacggccaggcggaggagggggaggggagaacggcctcgacatacacgcggttgccgcggcgatggccgagaagaaaaccccggccgccttttttcggaacgaggcggcggaccgcttccagcatccgggcggcgtcggacgtaagaaatacgtccatcgacggcttgatcaaagacgtttccttcatgttcaaccgagggggccgacggccttttccaccgcttccaggatctcccccgactggacgagggctttcatcttgttgtgatcgacgtgcaagggacggtcctcgtcgaggcgggcgacgtgtctgcggatgacgcccttggccgcccgggcgccggcgccgggcgtgaacgggcggaaatcgagaccctgggcggcggccatcaattcgattcccaggatgccgtaggcgttgtccaggatctggaggttcttcagggccgtgttcatccccatcgagacgaaatcctcctgatcggcggccgccgggatggattggatgcaggccggggcgctgaggatccgctgttcgacgaccagggcgtcggccgtgtattggctgagcatcatccctgaaaaaagacccgcgcccttcgtcaggaaagccggcaggccgacgctcaaggcggggttggtcaggcgattgagccggcgctcgctcaggacgcagaccatggtcaaggccgctccggccatctccatgggcagggcgaccggagtgccttgaaaattcgccccggtcagggtgagcttgttttcagtcaggaagatggggttgtcggccgtggcgttgagctcgatttcgacttggcggcgggcgtggaccaaggcgtcatgagccgccccgatgacctggggcgtggaccgcatggagtaggcgtcctggaccttggttttcattttgccggtggttaagtcgcttccctggagacacttgaggatggcccgggccgaccggacggcccccgggaagccgcgctcctcgtggagccggacgtcgtagggcttcaaattgccgatcagggcttcgatggtcatcgtcgcggcgatttcggcttgtttcagcgtccggtccatgtcgtagagcgtcagggccgatatggccgtcaggagattggagccgttgatggccgccagcccgtcccgggcttggaggccggggaccgggatgccggcccgttccagggcgacccgcccggccaggcgctcgccccggtaatacgcttcgccctcgcccatcagaagaagggcgacctgggacatgggggcgagatcgccggaagcgccgacggatcctttccggcagacgaccggagtgacgcccttgttgagcatttcggccagggtcagagtgatttccgggcggcagcccgagcggccccgggcatggacgttgatccggccggccatcgccgcccggacgtgctcgaccggggccggatcgccgatgccggcggcgtggttgtagatcaggtacttctggaactggccgacctgctcgtcggtgaggaccacctcggagaactctccgatcccggtgttgatcccgtacatgatctcgctcgccttgattttctcttcaagcatctcccggcaggccttgattttggcgatggcctcgggggggacttccaccggctcgccctcccgggcgatgcggacgagcttctccagggtcaggcttttcccatcaaggacgacggccatggggatcctcctcgggagttgcggtcttttccgcccagaccatcagggcgtagccgcgggtgaagaaaagcagcgtatcgagcttcgccgcgagccggagcaggggatagacgagcttgtaaatccggaagggcttcgcctgagcggcgaattcccccggcgtcgccggccggatatgcccgtcgcggagcctggcctccggcttggccgagaagaaattcacgtacagggcgttgagcacgagctccacgaattccgtgaaaaaccgggaatagaaggcgtgccgggtgatccggaggccggcccggccgagaagcatccggagggcgggcaaagcgtagccttcccgcttgtgcccgtagaattcgagcttcaggccgacggccgggcgtattttctgcatgaggatgaacggccccgtccgggggacgacgaggagcagcttcccgccgggaacgaggacgcgggcgatttcgccggccgtcttgagatcgtcgtcgacgtgctccaggaaatcgagacagaatacgcggtcgaaggacctgcttttaaacggcaggtccggcacgcccatctggacgaagccccggtcgaggaggtcccggctggtcagaaggttttcgaaatccaggtccgtatgaatccacctcccgccttttttcttcaagaaccagctgaggattccctgggcgcagccgaggtcgagacaccggtcgtccggcccgacatcgacctgctgttcgatcaaatcgattttttcccttttcttcagggaacggcgggcgacttcgagttgccaggggaatgcgtgggccacgtccggcattatatcccatctccggccggccggaaaaccggttctcgtccaacttgacaggggcggagaataacccctatgatgaccctcaggacggagatcggatgaaataccagatgatcgtggtcggtccgctcgagaccaactgctatcttgtctacgatgaggagacccgggattgcctgatcgtcgaccccggggccgacgccgaccggattttcccggtcatcgccgaggaaaacctcaaacccttcgccattctcaacacccatggccacatcgaccacatcggggccaaccgggacatgaaggacaagtacgacatccccctttacatgcacgcgggcgataaagaccgtccctcgcgtctcaaccagctcgagctgagccttttcatcggggccaaggattccccgccggccgacaagttcgtcaaggacggcgacgagatcaaggtcggccgcggcgctctccgcgtcatccatacgccgggacattcccccggcagcatcagtctcctggacgacggattcctcctgtccggggacaccctcttcttcgagggtctcggacggacggaccttccgggcggcgaccaaaaacagctcgaaaaatccatccgggagcggctgatgactttgcccgacgagatcgaggttctccccggccatggccccttgaccacgatcggccgggagcgcgaaaacctgacttttctctgatgagcccggctccgccttccgtcgacatccgggcggaattcctgcgtttcctgaccgtggaaaaaggcctttcgcccaacacgcgggaagcctacggcttggacatcgaccggttcctgcgattcctcgcccgcgaaaaaacgtcctgggaccgggcccgggaatcggatctggcggccttcatccggcacgagagccgggcgggcttgtcggcccgctcgctcgcccgccgcatctccgtcctcaaggccttctaccgctttcttcttctcgacggccggttggataaaaatcccgcgattcacttgacgtcgccgaaaacatggctggcgcttcccaaagccctgtccgaggccgaagtgaaatccctcctgggaaaaccggatccccgggatccccggggccttcgcgaccgggcgatgctcgaggtgatgtacgcctccggattgcgggtttcggagctggtcgggctgcggacggccgacgtccggctgaaggatgagttcatcctctgccggggcaagggggcgaaggagcggatcgtgcccctgggaaaaacggccgcggccgccgtcgtccgttacgtggaaaaagcacggcccgccctggcttcaaaaaagggcgcggacgagctgttcctgaccaggcggggagagccgttcacccggcaaggattttggaaaatgctgaaagggcatgcccgggaggccggcctccagccgaaagtccatcctcatgtcctgcggcactccttcgccactcatcttctcgagcacggggcggaccttcgctccgttcagatgatgctcggccacagccagatcaccaccacccagatctatactcacgtcagccgcgagcgcctccgccggatttacgacaagtttcatccccgagcttgaccggtccggggaccggagtccgcccgcggagtcacgacgacggtcacgtcggcctcgtgacgattcatttggaacaaggcgggatcccgtccgaggacgccggagcggcggaaccaggtccagtgaaatgatttttcctgcgttttccggctggccgcggggtcgtccaagacgatcgcattggatcctttttgaaggaagagggcgtaattcaatccttccggacggtcggtgttttcggccgaggccggaagatggagataaaaggcctcggacggccgagagcggggaacctcgaatccccggatgagaaaattcaggtgaaggccgccgtcctttcggaggatgtaggcgacgcccagctcaggcttgactccgtaatcgcgggtggtcaggagccggattccgtccggaccggcggcggattcctccactctccattcctcgagtttcgtcccgtggtggatgagaacgtaatcctcgtcgtcgggttcgaggccgcccctccagacgaatctcattccgtagcgtccggaggcgccgtcccggccctccagagcgtactcgccctggaccgtgatcgtcatccggatgtcccaggcttgggggggacaggggagggcggccccgcccgaggcgagaaaaacggccgcggaaagcaggcagaccgcagcgcccgctttcaggatcttggccgccggacgcatgcggctccattgtagaatgaacggaaaaacatttccaatgcgaaggaaaaaatcctcttgacaagccccttctcttcttgctatcctgcgccggtatactcattggtttaaagagtaaacttaagagtttaaaaatgaaacctcagaagagccggaagtctttatccgaaaagcggagcctccgggagctcgaccgccgccggaggaaccgggaggccatccttcacgcggccgagatcgttatcgggaggaaaggcttgacggcctcctccatggacgatgtcgcggccgaagccggtttttccaaggcgaccctttacaagtatatccaaggcaaatccgagctcgtcatggagctcctcatccattacctggaggacttgaacgaccggctggccgcgatcttgatcaagccggtcaagcccgaggccaaacttctccttcttctccgggaaatcctccgttaccaggcggagaaagcgaacatttcccgggcgttcatcatgaatccgtctcacatgcagatcttccgggcgatggctgaaaccggagcgatggcggcctcggaaacggaaaaagattttttccaccggcttcagacggcccgccgcgcgatgaccgggcacttggagcggtttctccgggaggggatcgcctccggggatttccgcccgtttcccctggagatcatggtccgctttctcaccgccgtgattctcgggtaccagcacgaccagctgttccgtgaatcgaaaccggatatcgataaagacatcaagaacatccacgagttcatccttcgtggattcaaaaccgaatcacaggctgattcttaaggagacgcagccatgaaccgatttcgcgcattgatcgccctgatccttctggcggccgtttcgggcgggccggccttggctcaggaaaaaatgctcctgaccctggaggactgtctgaaactcgctcttgcccagaatcccttctacctggccgcccgggccaaggaagaccaggccgaggcctccctcaaggaggcggtcgccggatttttcccgacgctcaacgcctccggcaccgacgtcctggataaaaaggtgttcacgatcgagtttccctcgttcattccgggcggatccccgacgcgcgtcaagatggatttcacccgggcttacaccttcgccttgagcttcagcctgcccctctactcgggcggacggctggtcgccggatataaaaccgccaattacaacctcgaggcgacccgcgaagccatccgccaatcccgggaggagatggtcctcaacgtcaagaagtctttttacggctatctcctggcccgctccttcgtcggagtggccgaggaaggcgtggccctggccgagaagcactataccaacgtcaagaatctcgccgaggtgggcatggcctcgaagttcgaccttctccggtcggaagtccaattggccaacctcaagccgcagctcatccgggcccgtaatgccctggccaccgccgaaatcggcttgaaaatgcagctcggcctcgatctccagaaatccgtggaattcaagggcgagctggctttccgggacgtggaagccgacgtcgaccaaaatatcgtcatggccctggcccgccggcccgagatcaaccagctcaactaccagaagctgatggccgcggaaatgatcaagctgaacaaaggcgccggccttccgagcctggctgtcggcggcgcctacaactactggtccgatcacctgaatctcaagaaggaaaactgggaaagctattaccagatcaatctcgtcctcaacattccgatcttcaacggtttcggcaacgcggccaaggtcgcccagtccaaggccgccttccggcagctggaatacagccagaaggggctgatcgattccgtgaagttcgaggtccaggaagccgtcctggccttgaggcaggcccgcgagtcccttttttcccaggaaaaaaacgtcgaacaagctcaggaggccgtccggatcgctgatttgaactacgccgaaggcctggccaccaatctcgacgtcagttcggcccaggtcgctttgtcccaggccaaaaccaaccatgttcaagccttgtacgattatgccgtcgccctggcccagatcgagaagtcgatgggaacaggctcggatcgatatgaagaataaacggagtcagcccatgttgaaacatcgtttgcccgccgttctgctcgccgccgtcgtcgttttcgttccggccgcctgccggaaaaacgaaacgcccgccgccgcggaagccgcggccgcgtcccttttgcagggaaccatgccggtcaaagtcgagaccgtctcccggcagcggatttcagaaaagatgacgttcaccggcgtcgtcgaggccgcccgcaagatcaatatcactccggagacgagcggcaaggtcgctcgcatcgtcgtcgaggaaggccagttcgtccagaaaggccagcttttggccgagctggacacggcttccattctccttcagctccagcaggccgaagccgcggcggccatggccgaggcgaacgccaagaattccgcccgcaacaaggagcggatggaccggctgatggctgaaaacgccgtttccgaaacgcagtttgaacaagtcaagctcgccgacgaggccgcccaggcccaggcggcccaggccagggcggccgtcgccctgatccgccgggccctggatcaggcggtgatgaccgccccctggaacggcgtcatcgcctcccggaacgccgaagtcggcgacattctcaatccgatgatgggcggttatggaagctccggctccggcgtcgtgactcttgtcgattacggccgcgtcaaaatcatcgtcgaggtgacccaggacgacatcctccgcttggctcgcggccagaaggccgtcgtccgctccggctcggcggaagcggccggaacggtttccgtcgtgaacctggcggccgatcccctctcgaaaaagttccgggtcgagatcctggccgacaatcccgggctcgtcctccggccgggcaccttcggatccgtcacgttcgaagtcaactcccacgagaacgcattagccgtccatcagaaagccgtcttgtccgattcgtacgtgttcacggccgaaaacggcaaagcggtcaagcggccggtcaccctgggcctcaaaaacacgacgatgatcgaggtcatcgacggtttgaaggaaggcgaccaggtgatcgtcgagggcaacttcggccttgtcgagggaacgccggtcgaaatcaaaaggtagtcatccatgcaactccctaattttgccgtcaaacgccgcgtttcgacggccatgatcgccctgatcctggtcgtcgtcggggtgatttcgttctcgagactcgggctggatctctttcccgacctcgaatatcccaccgtctccgtcgtcacgacttatcgaggcgcctcgccggaggacatcgaaaacctcatcaccaagcctctggagggcgtcgtcggctcggtcaacggcgtcaagaaggtcacgtcgatcacgtccgaggggacgtcggcgattcaggtcgaattcgaatgggggaccaacctcgatttcgccgcccaggatgtccgagaccgaatcgggctttacaagggcttcctgccggaagcggcgagcgatccgctcgtggtcaagttcaacatggcccagattccggtcattttctggggcgttgtcggcgatcgatccatgtccgagctgaaaaccatcgtcgaggacgaggtcgcccggaggttcgagcgcctcgacggcgtcgccgcggcgacgacgtattccatggacacccgggaaatcctggtggacgtgaacaaggacgccctggcttccttcggcctggcgttcgaccgcgtcctcggggccctgatggccggaaacatgaacatgcccgccggctatttggtcgagcggcattcggattttctcgtccggacgatcggcgagttcgagtcgttggacgatgtccgcaacacgattgtcggctccacggccaagggccagccgatttacgtccgggatgtcgccgacgtccgggatactctgaaggaaacccgctttatcggccggatcgagggcgagaaggccgtctatctcatggtcagcaagcggtccggagccaacaccgccctggtcggcaaggccgtcaaggccgagctcgagaacatcaagaaaaccctgccccccgacgtcaagttccttcagatcatggaccagtcggagatgatccagcacgtcaccaagggcaccgcggcgacggcctggcagggtggcttgctggccgtggccctgatcttcttcttcctgatgaactggcggccgacactgatcatcggcgtggcgattcccttgtcgatcatcacgacgttcatcgccctttatttcgccggctacaccctgaacctcctgaccctcggcggcctggccttgggcatcgggatgctggtggacaacgccatcgtcgtcatcgagaacatgttccgtcatatccaggagggcaaggacgccctatccgcggcccggctcggggcctccgaggtcgggatggccatcaccgcgtccaccttgacgacgatcgtcgtcttccttcccatggccttcgccaccgggctgaccgggatgatgacccggggattggctttgtcggtcgccttctcgctcgtcgcctcgttgttcgtcgccctgaccatcgtcccggccatgggctccgttctcttccagcggaaggaaggagacgcccaggcgatccggaagacgatcgggcgcgacttcaccggcgcccggaacaaataccgccaggctctggagtgggcccttcaccaccgcaagatcgtgatcttcggaacgctgggcgtgttcgctctctccctgttcctgatcccggtcttggggacggaattcatgccctcgatggaccgaggcatgctggttatgagcgttaaaacgccggtcgggacgtcgctcgaagaaaccaaccggatcgtgaccatgattgaaagcgtcatccggggccgtccggaggtccagatcacgtcgacccagatcggctcctcggccgaggaaaacgccggcgacgccggtttcgggaatcccaccgggccgcacgaggctgtcttcttcgtcggattgaagccgacggaagagcgccggctgtccgattcccaggtcgtcgaggaaatccgcaagcgggttcccaagttcgagggcgtcaagttcgaatccatggacatgtcggcgatgatgatgggcggagcggccgcccccgtcgagatcaagctgttcggcaaggatttggcgaaacttcgggaaatagccgacggcctggtcgtccggctgaaggacgtccccggcctccgcgatgtgacccattccctgtcccagtccaagccggagtaccacttgaaaatcgaccgggataaggccgcccgcttcggcctgaccgtcgcccaggtcgaatccgccgtccagacggcgaccctcggccaagtcgcgacccgctaccgggaagagggcgaggaatacgacgtccgggtccggttcaaggacgagttccgcgagacgatcgccgccatccgcgacatccccatctccaccccgatgggaacgaccatctccttggaccaggtggccgatgtccagtcgggcaccggcccgatccagatcacccgcgacaaccagtcccgccgcatttccgtcaccggcaatatcgtcggccgcgatctgggcggcgtcgtccgggatgttcagactcggatgaagggtctggacgagcaactgccggccggatatttcgtcgagatcggcggctcctattcccagatgaccgatatgttcaaaaccttgggctgggtttttctcctggccgttctcatggtttacatggtcatggcctctcagttcgagtcgctgaagcaccccttcatcatcatgttcaccatcccgctgtgcttcatcggcgtcgttctcggcctgctcgtgttcggccacactctcaacctggcggtcgggatcgggatcatccttctggcaggagtggccgtcaacaacgccatcgtcatgatcgattacaccaaccagctccggcgggacgggatggagatcaaggaagcgatcctccagggggcggtgacccggctgcggccggtcctgctcacagccttgacgaccattctcggagtatttcccatggccgtcgcccgcgggcagggcgcggagatgcgcagccccttgggcgtcactctcctgggcgggttgacttcgacgaccttcctgaccttgttcgtcattccggtcatgtacagtctctttgaaagagtgaggttcaagaaaaccgcggcgaaaaactgagacggatatcgcgtcccccgcggcccggatggaccgcgggggatttttttcgaagctcccgcgccgttaaaaagaagcgcttcgatccccgggggcggcgcggtcctaagctttatacctcagcagagcccccatcttgccgtagtggtcgagccgcgaaggcggggtgacgtacttgacgtcgcatttccggtggagggccgattcgatcgcctcgtcgacgatatcgggacgcgtttcggtcttgcgctcgcaggccgggcaccggagctcgtccagaaagagcaagcggcagcgggggcaatgctttccggggacgaaatggtggcgggtgacgacgagggtttggacttcgcccttgttgagggccgccaggcagtcgcgcagaccggagcgggcccgggtgcccttttcgatctcgccgatgagcattttcagaaggtcttcttcctccctttttttcagcgtccgctcaagatcctcggcttcccggaggaccacatcgagaggatcgataggccggactttgaggcggcccttgatccgttcccggacgaaggaatggagcatcccctcgaaatcgcggtagagggcgtcggggcagcccagccaaagcccggcgaagccgtctttcttcaggatgtcgaacgttgtctgggcgcatcgcttgaggtgggcgcggacaagggcctcgacgtgacgctcgatccgcttggcctcctgacccgagattccgcttttgactttcttggggatgtccgaggagagactggacagcggatcgatgcggctcatgtacacgtcgtaccaccgggcttcccggcggtcgagcgtcaggacgagaaagcggcggcggtcctcgagaatgcgggtgacgggccggatgtaaggattgcgatcgacgacgagacggtccaacggcgcctcgggaaggtcgagcgcttcccaaaagccggctcccgagcaggaataagccgccagccccggcacggtcgaggacagattgccggcgaagtaggcttcaagggcggccagatctttctccagcgaggattttatttccctggacacgtccatggaggcgatgtccgcccggccgccggcgatcatgttcttcgcggccagaaggatctcccggcgcgttcgtttggacaggttggtgtcgagaaagaacgaagtcgtcagaagagggccgccgtggaagcggctgagggcgacgatccggtcacggaagggagagggcatgaaacctccttatcgggaatagcgatgaacggctggaatacgggaatggaaaagacgccgtccaagacgtgcgagagcgtcatgtagattaaagataaagacggggcggaggattgtcaagcggacggaaagccgcttccccggtcctttacataaagccaaagaggccttataataaaaaacctcccgagcgcggaagtggcggaattggcagacgcgtaagcctcaggagcttatagccgcaaggctgtgggggttcaagtccccccttccgcaccatgtcccgaatcgtcgctaattcctttctccaagtgtgtttttccaggccgcggcatttgtctttgagggggaaatctgttatttaacatgggcttgggccggcccgggggaaccgcggcccgaaggagacgcgtccatgagaaaaaccgccgtttccgcgatgatcgggatcctgggagcgggtctcctcttggggctcgcggcctgccggaaggaaggcccgccggcgccgccggtggccgcggaaacaggaaaaggaggggcgaacatgagcgtcggcaagaccgttttcggaacgctgcccgacggctcggccgtcgatctttacaccttggccgacgggaagggattgacggtccggctgatgacctacggggcgacgctcgtttccctggaatggcccgaccgcgacggcgccctcgccgattgcgtcctcggctacgacacgcttgacggctatctcaaggccagcccgtacttcggggcgaccgtcggccggtacggcaaccgcatcgcccggggccgattcgcgctggacggaaacacgtacacgctggccgccaacaatggccagaaccacctccacggcggtgtcaggggcttcgacaagatcctctggaagggcgaacccgtccaggattcgtccggcgtcggcgtccggttcaccaccctcagcccggacggcgatgaaggctatccgggaaacctggacgtctccgtgacgtacgttctgacggccggcggcgagctgatcattacttatgtggcgaagaccgacaagccgaccgtcatcaacctgacccaccacggctatttcaacctcaccggggggcggcgcgacgttctcgggcacgagcttgagctggccgccgaccgctacactcccgtcgatgccgagctgatcccgaccggtcttctcgcgccggtggaaaacacgccgatggatttccggacctccgtgtccatcggatcccggatcgccgcggttccgggcgggtacgatcacaattatgtcctgaattccggggggaagaccctggcctcggccgcccgggtctttgagccggagagcggccgggtgatggagatccggaccgtcgaaccgggactccagttttattccggaaattttctcgatggatcgatcgccgggaaggccggccgggtgtacgggaagcactggggtttctgcctggaaacccagcattttccggattcccccaatcgtccggaatttccatcgaccgtcctgcggccgggagagacgtaccggacgatgacggtcttcaaattttcagcgaagtgacgaacggccgcggttgccggccgccgtcggaggagttgtccatgagagtgcccgcgcccgtccgattcctgatcgttctgctggctttttgggccgccggcccggctccggcccaggaccggctcaaaacgtatcccggctatgaccggtatgcggaaatcaaggaccagatcaagggagcggtcaaaccgggaaccgtccgggcggcctgggaggacggcggcaaggcttttacattcacccgcggcgggaaaaggcttcgcttcgacatccgccggaaaacgctgaccgagctcggccccgcccctgaaaaagccgaggaaccggtccgccgccggcccggcggcctggagcgaggccgtcaattcaccgaggctctttcgcccgacgggaaaaccaaggctttttaccgtgaccgaaacctctggatttccgatccggacggaaagaacgaacaggccgtgacgaccaacggcgacgaaaagctccggacgaagtgcggctcggccagctgggtgtacggcgaggagctgaaccagatcacggccatgtggtggtcgcccgattccaccaagctggcgttttaccgcttcgacgagagccgggtccccgattatgtcctccaggcggatcagacccggccctattcccgggccgacgtcgaggcttatcccaaggccggccggcctaatcccgtcgtcgacgttcttgtctatgagccggcggcgaaaaaaaccacggtgatcgacgtccgcgacggccggccgttcgaaaacgacgtcgtcggccattatgtctacaacgtctcctggtcggtcgattcccgggagcttcttttcttccggatgaaccgcctccagaacgtcttggaattcgcggccgccgatccggtcacgggaaaatgccggacgatcatccgcgaggaatggccttccggctgggtcgacatcgctcccgagctggcctggctgaaggacggccggcgtttcgtctgggcctcggcccggaccggttttaaaaattacgacttgtatgatttgtcgggaacgcggctcgccgtcctgacccggcatcctttcgaggcggccggaatcgtccggatcgacgagaagagaaacagccttgcctatctggcccgcgacggggccaacgaaatgatgctccagctccaccgggtttcactcgacggccggaacgacgtccggctgacggatcctgcttaccatcataccgtggacttttcgccggacggccggcacttcatcgacacctgccaggcccacgatgtcccgccgttcagccgcctggttgacgcccgggggaggatcgtggccgatcttgtccggagcgagacggcgaagttcgacgagctcgggcttaagaaggccgagctgttcacgttcgccgcggccgacggaacgacgccgctccgcggcctgttattttttccctcgcgcttcgatccctcgaagaaatacccgcttctggtgagcgtgtacgccggcccggaaaccaacggcgcccgggagacattcgccgcgccgagcgccctggccgagctcggcttcctggtggcttccttggattcgcggacggccggggggagaggccggcgcgccctggacgccgtttacggcaagctgggcatcgtcgaggtcgatgaccaggccgccggggtcgccgccctccgcgcccggccgtacgtggacggaagccgggtcggcatcttcgggacgtcctatggcggatatgtctcggcgatggccctcctccggcatccggaggtcttcgccgcggcctgcgccatgtcggccgtcacgacgtggcttcagtacgacagcatctacacggagcggttcatggggcttcccgaggagaacaaggcgggctacgaggcgggcgaggcgatgcgctatgtgaacgatctgaaaggccggctcatgatctattatggaacggccgacaacaacgtccacccaaccaatgccatgctcctgatcaaggccctccaagatgcggggaaaagcttcgatgtccagatcgggcccgatgaggggcacacggccctcaaccgggagcggatgatggaattcttcattgaggctctcgtcctgaagtgaacttttccagccccttttcgtttaaggagatgggagaaaacaaatgaactcgtcttcggcgaaaaccttgggcatcgttctcgtcatcctggcggtcctcatggccgccggccttcttcgggcgctgatcctgatccccctgggaatcgttgaaggattcggccacggccttcggcactggggcgggacctggttctggccgtggtttggcctcaccggcttcttcggcctctttttcctggttctctggatcatggtcgccgtttgggttcacggcgacgcggaacggaggggaatgccggggatcctgtgggccgtcctcgtgtttttcacccaccttctcggcttgatcgtctacgcgatcgtccgctcaagcaaatccgtcaagcgggaagggccgccgtcggccccgcccgccgagcccgagccggccgctccggggaatccgtccgccgagtctccgccccttatcatgccggccaagccggcggcctgctcccggtgcggaaaggaaacccggcccgaatggcggatttgtccgttctgcggggagaaaatctagcttattcacgggccgataggaacgcgtctattttgcggcggggagtcagccgcgggattgacacggcttcgccctccgcggttttattgactcgcaaatcatccggacaagaaagaaaaaaatcattttttagggttgactaaatattcaccaagtgatatattagatataagaaaggataacttgttgtaaatacagtaattagaaaacatcatggcccctaaaaaaaacttagttccgaatgaatccataaaaggattcattttcgatatcaagcgttttgccgtgcatgacggtcccggcatccggacgacgatctttttcaagggatgcccgcttcattgtctctggtgccacaatccggaaggcatcgaccggcgtccggagcttctcctccggtcggcccggtgcgcgcgttgtcacgcctgcgtcaaggcatgtccgaaaaacgccttgtcgcccggggcggacggagatcccgtgaccgtcgatcgttccctctgcgaccgctgcggagcatgcgtcgacgcctgcgcttacggcgccctggaaatcgccggccgtcaaacgacggtcgccgatctcgtcgccgaggcggaacgcgaccgcgtatttttcgagtcgtcgggcgggggagtgactctttccggcggcgaaccgctggcccagccggagttctccttggccctgctggaagccttgaaagttcgcggattggccgcggctctcgatacctccggggcggtggagggggacattctggaccgggccgcggatctggccgaccttattctctatgatttgaagaccatggatgaggcggtccatcgccgttttgtgaaaacgggaaacgcccgcatcttggagaatctgcgccggctcaaccggcgcggccgggccgtccgggtccggattcccctggcggccggggttaatgacggcgaggagaacatcgacgcctcgatccgtttcctgaaaaccctggcctccgtccgccgcgtcgacttgctgaagtatcaccggggcggagaagagaaataccggaacctcggccgggcggcggacttcgagattttcgagcctccttccgatgggcggatggaggacatccggcgggcgttcgccgaggccggattcaacgtttccatcggaggttgatcgtgatgaccgagcgggtgaaaaagctgcgggagaggagcctggcggcggttccttcgatttccggagagcgggccgcccttctcacgtccttttatcggagccccgaggcgggccggtgttcgccggccgtggcccatgccctggccttcaagcggatcatggctgaaaagaccgtctgccttgaagacggcgagttgatcgtcggcgaacgcggtccagcccccaaggccacgccgacgtatcccgaggtcaattgccacagcgtcgaggatcttcggatcctcgactcccgccctaaaaccttcttcaaatgcgatccctcggtcatccttttgtatgagaaggaaatcatcccgttctggcgcggccggtccatccgcgaccggatgatggaggttctcccccccgcttggaaggacgcctacgccgcggggatcttcaccgagttcatggaacagagggctcccggtcataccgtcctcgacgacaaaatttacaaaaaggggatggaggacttcattgccgagatcgacgccgaaacggcccggctggattttctcgccgatccgctggcctatgacaagcgggaagaactgcgggcgatgcgaatctccgccgaggccctgatcatccaaggccggcggcacgccgagaaagcccgggagctggccgcccgggaggggaacgcggcccggaaaaaagagcttctccggatcgccgaagtctgtgaccgcgtcccggcccgcgctcctcgggatttccaggaagccctccagatgtactggttcgtccacctgggagtgatcacggaatacaacacctgggactcctttaatcccggccgcctcgaccagcatctttatccgttctaccggaaaggcctggaggaggaaacgttgacggaggaatccgcccgggagcttctccagtgcttctggatcaagttcaacaaccagccggctccgcccaaggtcggcgtaacggccgaggagagcgggacgtacacggacttcgccctgatcaacctgggcggggtgaaagccgacggctccgacgcggtcaacgagcttacgtatcttctcctcgacgtcatcgaggaaatgcggctcctccagccgagctccatggtccaaatctccaagaaaagtccggagaagttcctcctccgggccctgaaaatcgtgaaaaccggcttcggccagccgtccctgttcaacacggacgccatcgtccaagagctggtccggcaaggaaaatccgtcgaggacgcccgaaacggcggtgcttcgggctgcgtcgaatcaggcgccttcggcaaggaaaattacaccctgacgggatacttcaacatgcccaaggtcctggaggtggccctccgagacggcttcgatccccggacgggaaaacagctcggcccccggaccggcgatccggcgggattccagacgttcgacgacctcttcagcgccttccaagcccagctccgtcatttcatcgacgtcaagatcgccggcaacgcggtcatcgagcggttgtacgcgactcttctgcccgcgccgtttctttcgatcctgatcgacgattgcctccgccgggggcgggactaccacgccggcggagcccgttacaacacctgctacatccagggcgtcgggctcggatccatcaccgacatgctggcctcgctcaagcacaacgtcttcgaaaagaaaatcgttacgatgaaaaatctgatcgccgccctggacgccgacttcgccggggccgaggatctgcgccagcggcttctcaataaaacgcccaaatacggcaacgacgatgacacggccgacgaccacgcccggcgggtctttgaggcgtattttgcggccgtcgacggccggcccaacacgaagggcggctcttaccggatcaaccttctcccgaccaccgttcatgtctacttcggcaaggtcaccggagcgacgcccgacgggcggaaagcgggggaaagcctgagcgagggcatttccccggtccagggttccgaccgcaagggtccgacggccgtcttgaaatccgcggccaagatcgatcatatccggacggggggaacgctgctcaatcagaagttcacgccgcagcttctggccgacgaggaaggtctccgcaatctggggcatcttgtccgggcgtacttcacgatggacgcccaccatgtccagttcaacgtcgtcacggccgaaaccctccgcgacgcccaggcccatcctgaaaaataccgcgatctgatcgtccgggtcgccggctacagcgattacttcctggattgctcggtcgacctgcaaaacgagatcatccgccggacggagcacctgggattctgaagcgccgacccttcggttgattatttttcgtaatgtgttcccttataaaggggacttctggcggattttcggctcattccgagtcatgcgcattcgctgatccataacagcccgccttcaattgggcttgacaggccttgtgctcttaattatcctcatttcagtgggaaagatgggatttcgcgacaaaacggggattgtcgcgggggcagtcgaaaaacgaaattcctatccattggagacctcgcttttcgcggattcggcgactgggggcgccggagattcggctttccgacaggccgaaacgctcaggatcatcagcaggctcagaacgagaacggatttaccgaaggaattcatgctcatggatgacgctcctccgcatgtcgcgcccgtgcgccgtaagtaaaacgggtactaaatatcagatttcggggaggaagacgaattcagagaatccgtgccgctcaacagaaacgaaaccaattggacccggtttttcagttccaacttcctgaaaatctcggtcaaattgtttttaaccgttttggtggagataaacagagttcggccaatctcctgattggtctttccctcaagcaccaaattgatgatatccaattctctcggagtgagaggcaagccctcgagccgtttcttcggacggggcggcgtttccccgtcatccggatgcgaaatccaattttttttcaaccggccggacagaaagaccagggcgggaacgggcaccgcaaccatcagcatagaaatgaaataataggcgtgggatagggttccaaagaaccggaaggggaaatggaacaaatcgatcaacagggttaacagggcgaaagcggcgagaaaataaaatcccagtatccgaccgatggcgagggtcttctcgtcccgtcccgcccgtttctgcaggcccatccagagcgccggacatatcagggaaagggaagaaatcacgataaacatacgaacgctcattcggctgatatcggtgaatcccgtgtcgacaatggcgaggacagacagaaaaaggaggataaaaacggccccgtgcccgatccagaacagggacctcacccattggggtataggccgcggtcccagggagtcggccaggagcaaaaaggaaaaaaagaccgccgccatcaggggatagagaaacagcgcggccaaaagggtaaacagcccctctttttccgaaaaaacggaaacgtaaagaatctttgaactgagattgaggaaattgaatgcggtataagccacgacaaagaagaaaaacatccggacgaagcgaaaggagaaccgtttccggatcctgtaggaataaaagacctggaccgcagaaatcaacaggaacaagccatacacgagcaggaccataaagggttgagtctgcggcatatccatccagccccatcatatcattcttttgaccgggaaacgccccttcctgaagaaagggacaagcgggaccaaggtcccgttcagtttttcgggaccaatgtcccattccatctgacgacttttcagtctatcgtaccatccgcgcttaggagttgaatatgaaaaagatcctgcttgaaacggcggctacgatcgtcctttcgttgactcttcccgggcaaaccggcgaaatgggcggatattgggagggggccatggaactccataaccaagccacccccctggccatccggtttaaaggcgccgcgggaacactaagcatcccggaactgaccattttcgacgcccccctggaatttatccaacgaaccgatagcgccgtgaccttcatataccgggacctggattttcccttttccttttccggaatcctgaaaaaggacgccctcaaaggtcaagtgaaaatcgaaaccggaggggccttgcctgatttggaacggctggacattcctttccaactgacccgaatatccgactctccccccattcccccctacctcatcaaacacctgactatccccagccacggaatcaaactcgatgcccatctgtatctccctgaaaaacaaactctctgcccgggattgatcttgttacccggatcgctatcgcgggaaaagggagacatggctttctatgctgatttttttgcccgtcagggtgtggcctcccttgtttttgataaacggggaagcgggaaatccaacggcgcataccattccgccgcttattcggatttcgccgatgatgccgcggcttgcctcgacgagctgagccgccaggcccgggtggataaaaggcggatcgggctgatgggcatcagtcagggggcgctcctgcttcctatcatcgcctccaagtcgccgatcccggcgtttttaatcgccgtctctccggaagtcacttgcgtgcttcaatcctccatctaccaggacggcctgcggcttcggcgactgggctattcggaccgagaggtccgcatcctggaggacagccataacgaggtggcccggatgatccgtcgggggaaatcggcgagagaggtggaacggttcatcctggacaatgccgccaaacactccttcatgaaccaaacgagcctgcatgaccgggtccacatcacgccggaggccttttcagggttttactggaaggatagggtgacggatctctattcattttggaatcggctttccgtcgacactctggtcatcctgggagaaaaagacatgttcatcgacgccgctgaaaacaggcgtcaactcgaaaggctgaaccgcccgaacattcagatccggatctttgccaaggccaaccatgtcatgaagaaggccgtcgatccgctgacctcgtctccggacgccatggagtggccccgggtccttcccgaatacctggaactgctgaaagagtgggcgggtcggaagtgaagcgcaggctttccagcggacctgaaggcggatttcaaatgatgtcctttccctgaaaccaacgacgagagtgtaaggaaatccgtgtaaaccccgcagaagtggagaggacaaaaggtatgcggtatttaaaagtacggcaacgacgacgattacgccgacggactcacccgggcggcattcgaggcctatttcgccgcgatcgacgaccggccgacgacgaagccgggcgggcgctaccggatcaacatgctcccgaccacggtccacgtgtatttcggcaaggtcaccggggcgatgcccgacgggcggaagtcgggggaggccctgagcgagggcatctcgcccgtccagggcgccgatcgcaagggcccgaccgccgtcctgaagtccgcggccaagatcgaccacatccggacgggcggaacgctccttaaccagaagttcacgccccagctcctggccgatgcggagggtctccggaatctcggccatctcgtccggtcgtacttcaagatggacgcccaccacgtccagttcaacgtggtcacggccgaaacgctccgcgacgcccaggcccatcccgagaagtaccgcgacctgatcgtccgggtggccggctacagcgactacttcctggattgctcggtggaccttcagaacgagatcatccgccggacggagcatctggggttttaaatcgccgacttaagtccctgatagagacgagagagaattctggcggattttcggctcattccgagtcatgcgcattcgctgatccataacagcccgccttcaattgggcttgacaggcctggtgctctaaattatcctcatttcagtgggaaagatgggatttcgcgacaaaacggggattgtcgcgggggcagtcgaaaaacgaaattcctatccatagaaggggttcggcccatggcgctgacgcgcggatcacggctcgggccgtacgaggtgctcgccccgctgggcgccggggggatgggcgaggtctaccgggcgcgcgacgcgcgcctggaccgggacgtcgcggtcaaggtgttgcccgaggcggtcgctcgcgaccccaagcgtctggcccgattcgaacgggaggccaaggccctggcccatctctctcatccggcgattctgtcgatcttcgacttcggcaaggagggcgagaccgcctatgtggtgaccgagctcctcgagggcgcgacgctcagggatcgcctgggacgcgaggcgctgccgtggcgtcgggccgtcgagatcgcgacggccttggccgagggcctcgcttcggcccactccgccggcgtcgtccaccgcgacctgaaacccgaaaacgtcttcctgacgcgcgacgggcgggcgaagatcctggacttcggcctggcccggaccggcgccgggccgggcggggtgctcgaaacgctgtcgctcacgccctccggcacgacgccggggacgatcctgggcacggtcggctacatggcgccggagcaggtgcggggcgagcccgccgacgcgcgctccgacgtcttcgcgctcggctgcatcctgttcgagatgctgaccgggaggcgcgccttcaaacgggacacggcgaccgagacgatgacggccatcctgaaggagccggtcccggaggtgaccctctcgaggggggaggtccctgcggagctggattgcgtcatcggccactgcctggagaaggacccgtccgagcgcttccagtcggcgagcgacctcgccttcagcctgcgggaggtcgccaagccggcggcgcgcgccgtcggccggaaacccgtcggaaaggggcgtcggctgcggacggcggcggtcacgctggccgtcctgctcttggcggccggcgccgtgatcttcagcgtccggagaaccggcgcgacccggcggggggcggccggaccggcggccggggagaggatcgcggtcctgccctttgaaaacttgggcgggagcgacgacgcctacttcgccgtcggcgtgaccgacgagatcaccggccggctcgccgcgctgcggagcgtgtcggtcgtgtcgcgcgcgagcgccttccagtacgccgggagcgccaagagcacgcgggagatcgcgggcgagctcggcgtgagctacctgctcacgggcacggtccgctgggcgcgcgggccggcggcgggcgagagggttcgcatcacgccgcagctgatccgctcggccgacgacaccagcctctggtccgacgtctacgaattcgacatggacgacattttcagcgtccaatcccggatcgccggcgaggtcgtctcccacctcggcgtcgcgctcctcgacgacgagcgcggcgcgcgggcgggccggccgaccgggaatctcgacgcctaccaggcgttcctgcgcggccgcttcctcgtccggcagccccacttcacgctggccacctggctcgccgcggtcgacgacttcgagcgggccgtggcccttgatcccgattttgccctcgcctgggccgagctgacgagagcgaacgcgcgcctcgtgtatctccgctacgacatcacgcccgagcggcgcgagcggagccagaaggcgctcgaccacgcccgcgggctggcgccggacgcccccgaggtccgcctggccgccggctactaccgcctctgggtggagcgcgacccggcggctgccctggccgagttcgaggcggcctcgcgcggaatgcccagcagcgtcgaggtgctgagcgccaagggcgagctctaccgcctgcatggggactggccgaaggcgctcgagaccttccaggcggccgccgcgctgagcccgcgcgacggttccgcgatgatcgaggtcgctcaaacctgctggtgtatgcgcctctaccccgaggcggtcgatggggccgaccgcgcgatcgagctcgccccggaccaggcctggtcgtacctcgcgaaggcgttcgtgctctggagctggaaaggccgcgacgggttggccgacgcgcggaccgcgctggaaggcgtcccgaaagaccatgaatgggccgactgggcctggttctatcaggaggcgttcgaggggcggagcgccgaggccatcggccgcatggaagcgaagcccgaggaatggattcgcaacaagattcaggcgcttcccaaagcgctcctggcggcggagctctatgccgcttccggggatacggcggtcgcccggaaaggatttgaggcggcccgccggctgctcgagcgcgaagtcctggccgttcccgaggacggccgctatcacagctccctgggcgttgcctacgccgggctgggcctgcgggaggaggcggtgcgcgaaggacaacgcggcgtcgaactgctgccgatgtcgaaagacgccgtctatggcgcatcccatgtcatcgacttagcgcacatttacacgttgctcggggacacggagaaggccgtcgagcagctcgagttcctcctctcccggccgggctgggtcagcgcgccctggctgaaagcaaacccggtctggcgcccgctgcggggggatccgcgcttcgaagcgctcttcgagaaatacggggactgatatccttcgcggccgggaacatgaagaagaggtccgcggcgccagcgggagaatgaggttgggtgccgcccggggcgttaaaagacgatcgtggccttgaggacgccgtcggtccggtcggcggctgtggcgaaggctttttccgcctcctcgatcttgaaggtgtgggtggccagccagtcgatgtccaggtgcttggccttgacgagcatcagtccctgattcacgcaccggttctgccgccggaggaaccggaggccgatctccttgcgccgcagccgggccgaaaggtaggaaatccgttcgtccggggggattccaatctggtagatccagccgccgggcttgaccagctcgacggcctgttcgatcgccgccgggtcgccggacgcttcgaagacggcgtccagcccgagcggtttccgcttgaaaatctccgagacgacgtcgaggcggtcgggattgccgccccaggcggcgccggctttgagcgcggccgcaatccgggcgtcggagcggtcggtggcaaagatgtccccgtggccctcggttttgagaacctggacgagtaaaaggccgatcggtcccgttcccagcactccgatcgacggcccgagcgttccgacggccagggcccgggcgtggagggcgatcgacaacggctcgaccagcatcgcttccgtcatcgtcagcgtctcgggcacggacaaaagattgcgttcgggcatgacgaaatattccgccaggcagccgctccgctcgccggggtggccgagaaaagagacatgccggcacgtgtggggccgcccggcccggcattggtcgcacgttccgcaggagatcgacggctccacggccacccggtcgccggctttgaactgtttaaccgacggcccgacggcctcgacgaaggctgagcactcgtggccgacgaccgccggataggggaccgcttcgcccccgatgcggtccgccgtgaaatagtgaagatcgctgccgcacaggccggcgagcgccgttcgaagaagcacatcgtcgtcgttcttgaggaggggtttcgggacgtcgcggatttcgactttccgcggggcggtcaaaaaggcggctttcatgtgatccttctccccggccgagaccaggccgttgcccttcatcatatcaaaagtcccgccgtaaaatcacccttttccgcttctttggaaaaagagaatgccccggtccttcctaaaaaaagccccgtccgcggagggacggggcttgggacgagcgcggggaaaccggatttttattttttcggcttgacctggattttatccaagccgggttttttcgcgcaatcggccgcgaaatcctgctcccgctgggaattgacgtagtcgggatgctggaaccggtaagtgaaccgggtgtgttcgtcgtacgtcccctggagcagggcgatgacgtcctcgatgaagacccgttcctcgtcggtggggatgacgaaaatcttgaccttggagtcttcggccgaaatctcggtttcggcgtttctcgttttggccagcttgtttttcgccttgtccagcttgatgccgaggaattcgaggccgtcgagagatttttcccggatgaggtcggacatttcgccgacgccggccgtgaacacaatggcgtcggccccgccgatggcggccaggtaggccccgatgtatttcttgatccggtaggactccatctcgatggccagggcggcccgagcctcgccggcctcggccgctttctggacatcgcggcggtcggtgtatttgcccgtgatgcccagaagacccgacttcttgttcaacaggtcgttcatcttggccggtgcgatgttctccttctccatcatcatgaggtcgatggccgcgtcgtggtcgccggcgcgggtgcccatgaccagcccttccagaggcgtcaggcccatcgaggtgtcatacgacacgccgttcttgatggcgttggccgagacgccgttgccgatatggaggcagatgagattggtcttgaagggatccttgcccagcagcagggcggcccgcttggccacgtagagaaacgatgtgccgtggaagccgtagcggcggacgccgtacttctcgtaccactcgtagggcagggcgtacatgtaggcgtgggccggcatggtttggtgccaggccgtgtccatgatggccatgtggggaatggacggaaggacgtccatggctgcctcgatgcccagaacgttgggcggattgtgaagaggggccaagctgtagagagccttgaatgtgtcgagggaggcggcgtcgatgatgacggattttttgaacttttcgcctccgtggacgacccggtggccgacggccgagatcttcttcaggtcatcgagcacgccgaccttcgggtcgagcagcgtgtcgatgatgagcttgagggcgtccttgtggttggcgcagtcgtggtcgatctggatcggcgcgcggccgagaccggcctgctgaatgaagcttttgccgatgccgacgcgctcgacgatgccggtggccagggtgaccttcttgtcgtaatcgtacagacggtacttggccgaggagctgccgcagttgagggagagaacgatcatggaattctcctatgtgacgcgttcgatctattcttgaccgcttacaggccggcggcctggacggcggtgatggccgtgagatggacgatgtcgtcgacggagcagccgcgggacaggtcgttgaccggcttggcgatgccctgaagaatcggtccgacggcctgggccttggccagccgctcgacgagcttgtaggcgatattgcccgactggaggtcggggaaaacgagaacgttggcctggccggcgatcgccgagttcggcgccttggcctttccgattttcgggataatggccgcgtcggcctgcatttctccgtcgatcttcaggccgggggcgagctccttggcgacggccacggccttcttgactttgtccacgagctcgtgcttggcgctgccgtaggtcgagaaggatagcatggccaccttcggatccattccgcagagaacccgggcggtctcggccgaggcgacggcgatttgggccagctcgacgtcggatggggcgggcatgacggcgcagtcggcgaagacgaacatgccgttgtcgccgtaggagcagtcagggacgatcatgacgaacgaactggagacgatgttgatccccggcttggtccggatgatttggagggccggccggatggtttcgccggtcgagtggaccacgcccgagacgaggccgtccgcttcgcccttgtggagcatcatcgtcccgaaatagaccgggtcggacatgagcttgcgggcttcctcgggagtcattcccttggctttccggatctcataataagcctggacgtattcctcgaacttcggggacgccgccggatcgaccgaggggatcccggagacgtcgacgccttgttctttggccacggcctcgatcttcgcccggttgccaaccagagtgacttgggcgagctgttctttggcgatctgggcggccgccttaatcgtccggggctcctcgccttcgggaaggacgatgcggcggggcgtcgccttcgctttttccttgagactctcgagcagggtcatggatgaatcctccatacggcaattcccttgtcgattattaaatgtttataaaacaaggggttggaaggcgtattttgcctttccgcgcctgaaaagtcaatgttttggactggtccatgatttcggccgcgaatccgcctcttttatagagggaatccatggaattttctttgtttcgcggccggggaatcaatcctcgatgccgtggcgggcggggacgccggcctggaaataatgcttgatttccttcatctcggtgacgaggccggcccgccggatgagcgcttccggagcccggcgcccggtcaaaacgagctcgacggacggaggtttctcgtcgagaagggccaggacgtccggcaggccgaggaggccgaagtgaagggcgacgttgatttcatccaggacgacgatgtcataccggccggaaagcatcgccttccggcagaggtccagccctcggcgcgcccgccggacgtcttccggatccggccggccggcggtccggatcaagccgggacggccgaaggtcgcaaacgtgatcaagccgccgagccgccgggcggcggcccgctctcccgaggaccgggctttcatgaactggccgaaatacgtgcggtagccgcggccggcggctcgaagggccaggcccagggccgccgtggtttttccttttccgtcaccggtgtagatttgaacctggccctggagggcgggcggtcttgatttcgctctcttgctcttcattgttcccgattctaccacgagccgttcggcttgcataattccctgtcttgacttatattgccattgacagcgggtccacctgtcatccaatcacgaaaaaaaggcgaaggagtctcccatggccaagaccatcaccctgacccaaaccgactatgaccggttgaaggcgttgacttccgtcgatccggatccctcggatctcgataaaaacgctttccaggagctccgggccgagcttgatcgggctgtcgtcgtcgatccgaaagaaatcgacccgaacgtcgtcaccgtgaactcgcgggtccttatccaggacgtcgcgacgggcgaggaaaaggaatacacgctcgtttttccgctggcggctgatttcagcgtgggaaaaatctcggtcctggtccccctgggaaccgctctgctcggatttcgcaagggcgacgtcgtcgagtggaaggtgccgggcggactccgtaaattcaagatcaagaaagtcctctaccagccggaagccgccgggaatttcgaatcctagccgatcgacttggccagggccccccatttcttgtccaggcggaatccccggcggaggaaaaagccgggaaggtagaaatgggtcaggaccgtcgtgtatccctggccggccatccgcccgcaaaaatcgtccaccacggctccgcccaagccgcttgacttcagccgggacgtgatgacgaccgcatcgatgaaaacgacggaccgggacatgacccggtagcacaatcctccgacgatgcggttctggcggtcttggaggatgaaatgccggtcttgttgggaaatgaccttggggaaattctccttgtagaagagccgatagaggcggccgatgtcggccgggtcggttgtttcgctgaaggcgtacgtttcgccccggcggtcgacaagaaagctccggacgacgatccgctccgccccctcttcgccctcgacgacgacgtcgagacggcggtccggctcgagatggggaaaaatcatccggctgaagacggcccggtccctctcgtcgttcaaggcggcttggagatcggacagctcgacgtgccggacggccggggccttgggattctccgacatcaaggccaggagccggtcgaacagctcctcctccttcaagctccgcccggcgaaataggtgtggcggtagagatggtagcggacgatctccgggaagcggcccaggtcgtatttccggtgaagatcgaggacctttcgttcccggtcccgggagtcggccttcggattggccgcctcccattcctgaaaggcccggacggcgttgagcccggccagcgggattcggtagcttttttcgaaccgggcgcggtactcggccagcagccggcgcaggccggccagctccggtgaggcgggcttccccccgccgaggtcgttttgaagttcgacgaaaaaggccgccgcttcatcacggcccagggcgttgtagcaggcgtcgaaaatccattccaagtccgtttgctcccggatccaaggataatcggcggccgtccgacggtaaaagcggtcgacgagcggacggacaatcgacagagtgttccggtacggcgtccgggagtcgagagaagcgatgatcgtcgcgtcccggtactcgatttccgggacgatggcgttgaggggggaaacggggcccggcacgatccggcggccggtcattttccaggcccggaagaagacggacatcgcttcaatgtagagcttccgccaaaccgccagttcgggcggaggcgcgcccgccgcccggcggccggcgtattcacggatcttttcccagagggtcaggtcgccgatgtatctccgggagacggcgccttccccaagccggattgccccaaggggagccatggccgccgtctcctccgggtggtcggccaggaaggccgaccagagaatcgtccgccattcgcggtccgaccacggccgccctttgaggaaaagcttcaggtcataatggcggctggaggtcgtattcaggctgatccggtaatcggggaaggaggagacggaatgggcccgggaaatccaaatgccggcggccgggatgtccctcgggttgaaatcatccgggccgaaggcgaaccggatggactcgtggaggaacgtcgtcccgaggagaagcgttttcaaccggcggatctcggcgggaccgagcccttcctcgaaaaccagccggtcttcttttctcaagacgccgaaggcggctttcttgccgtctttttcgatcccgtgtgtgagcttggccaggagcttttcggccgaggcggccagccctggatcggccgtatgaagagcccaggccgccagctccgcccggatggagccgaagaattccgggtgaacccgggtcaggttcgccagcagccggaggatgcggtcgaattggagtcgggtgaccggattggccggccaggtcatcgtttcccggtaggcgatcatccgccggcggagtgaatccaggcggcttttgcccggccgggccgagacgattccctcgatgctccgggcattgaggaacggcttgcccgactggacgaaggccggcagaagccggctgtaatcgacgtttggattgtcgaggagaaggaggcggtaggcccagcagcggacgtcttcggccggatggccggcaagggcccggagacggctgcggatgaggttcgtggttcggagatccggctcctggaaaagcttttccagctcgtcgagaaggccgtcgagcggcttccgtccggaaaataggatccggacgaggatttcattgaggcggaggaggggagtgttccggatattggacggctgggcgatatcctccgtcggggcgagacggacgcgccggtcgggaaggaagacgcggtccgtcgccggctccagcggcaggtcccagccttccttgcagggggaaaagcggatcaaggcgggattgccggcccaaagaatcggctggcgggcgaacaagcctaaatcgacgaccgtcccctggatttcgtattccagatcgcccaccagccagactttcggccgggccgtcggccgcaacggcaggcggagcttccggttccggtcgcggaggccgcgggcgtcgcgcgtgatttcgtcctccaggatgcccaagtcgcggaagaaccacagcgggatgcggacggttccgccggggccggccagctcaagataaggtttgcggtagagctcctcgatccggccggaaaaattctcctcgatccgcttccggttgaaggaacccttgggagtcacctcgccccaggcggcgtcgaaatcgcggtcgaggacggcgaaattgatgacccgttcgtaaggagccaggtcggcgttggccgcggtgacgatccgccggtaatattcccggccgttatcctggaccaaggccgaggccaggacggtgtcgctgcggtcgggaacgatgaacagcacgttggtgggccgcccgtctccgacgagaaacgtccgcttgatgccggggacgccgatgaatttatcctcgaccttgcggggagcgatcgtctggccccggttgtttttataaatgtccttgatccggtcgatgatttggtaatagccgttggacagccgccggaagatgtcgccggtctgaagccagtagtcggtctccggattttccgggaaggggatgaggctttccggcgcggccgcttccaggtaaggggcgatgtaatggccggaggcctcgagctcgctgtctcggccgaggcggaggcggacgcccggaagcggcagcccgtgggtgttgtcgacgtaccggccgggagaagtcatggtgattcctccggtgccctcggtcatgccgaacccgctcgaaaggttgatgccctcctgttcgaaaaaccggaagactctcggatccaggtaaccggcggcggacaggccccagcggagccgctggccgacaaccgagcggatgacgctcttccggtcggcgccggaggtctcgtccagcttttccaggcacctctcgtagagctgggcccagcggacggggacgctgatgaatcccgtcggattgaccttggggaagagggtgaacagcgtgtcggccgagggattcccggcgaagacgtatgtccccctccagaagatcatgccgagaagctccaggtaacggccgaacgtgtgaaagaggggaagaaagctcaggaagacctcgtcgtcgccgacgtcgggcagggccgccgcccgggcgaagcgcttggagaccaggtggtaggaagaaaaggacacgcctttcggccgcccggtcgagcccgaggtgaacatgaccgtggcgacttcgttgaccggccggcggcggcgggcctcgagaagcgattcgagggaacgaaccggccggcgtttggcatattcaatgaggacgccgtccttttcattttccggcttcccggccggggccacggtcaagatccggaacggccgggccgtccggcggcggacttcgcccaggattttccggcggtccggccggtcggtgagggcgatcgtgatgttcagagcgtcgaagatctcgaccaagttgtcgatgttgaaatggggattgatcggcgtgtccagaatgtcgtaaaggaggcaggccaaatcggccgaggcgcattcgacgttgttttccgcgtagatcgccacccggggctccgctccgtcctcctggcccatggcgtagaatgagccggcgagctcccggacccggcggcccacctgttcgtaggtccattggacgggcgtggacgcggacatgtcttggaaaaggatcttgtgaggctgttcccggatccggctttcgaacaagtcgaggaggttgtagccggtgagacggatgaaggcgaagaccgtctccgcccatcggttcaacaggtccggttcgccgagcgcctgaagaaacgtccggctcgacgtcaggttcaggtattccttggccgaggcggccgccggaaggcggcccgaggagacggcggattcggcggcttccaggatttccctcgcccgaagaggagtcggagattcgaattgaagcgcatgccaagggctggatcggtatcgccccgcggcggatccgcctttcttcataaaaaatattatactccggaacgaccggtgtttccagcaattcttgacatgccggtaaaaatggtctatagaaggattaggccattataaggtggattagtccatttggaggaaatcatggaaaagatgaagctggacaaaagctcttccgctccgcccgcttatcagcaaatcatctcctttttcgaccagcagataaaaaaccgcgttcttcttcccggcgacaagctccctcccgagcgcgagctcgccgaggaactcggaacggcccggggaacggttaaaagagcctacgaggagctcgtccgccgcgggctcatcgaagcgttttccggccgcggatctttcgtcgccggggaagcggtcgctccggtcgaggatcgcaaagaccgggcgatccggctgatcgacgagctattggatcaactgggtcgccttaagttttccgcccaggacattcggatgttctttgacctccgcctgctgggccgggaggacagcctgcggaatctctcggtggccgccatcgattgcaatcccgaaaccctaacgattttcgagcgccagtttctcctgatccccaacgtcaacctggctcggatcgacctggacgacttgttcgaggatcccggggcgggcgcccgtctcgagatcttcgacctcgttttgacgaccaccacccattaccaggaattgatcgaccgcttccccgaaatccggagcaaggccgtccaggtggccgtcgccccgacccggacgtccatcatcagcctggcccggctcacgccggctcagcggatcggcatcctcagcgaatcgagaaagtttcaggcgatcatcctggaccatctccggacgttcgacatcccctccaccggcgtcaaaaccctcttcatctcccagctcgagcgtctcgacgagttcatcgccgcgctcgacgcggtcatcgttccggccgggtattccctgcagaaaaaccgggagcacttgcccgctctccaggcgttcaccgagcggggcgggatcatcatccccttcgattaccaaatcgagcggggctcgctccttcatgtcgaagagcggctgcgaacgctcctggacgaggaaaaaaggagcgtctgatgaatccgcaaaatatcgttctcggcgtcatcggggccgactgtcactcggtcggcaacaagatcctggatgcctatttctccgaggcgggttttcatgtgaccaacctcggagtgatggtcagccaggaggaatttatcgacgcggccgttgagacggatgccgcggccatcctcgtctcctctctttacggtcacggagaaatcgactgcgaaggccttcgggccaaatgcatcgagcgcggcctggaccgcattctcctctatgtcggcggcaacctcgtggtcggcaaaacgccctatgaggaggtcgagaagaagttcttggacatgggcttcaaccgcgtcttccgcccccaggtcgacctggccgaggtcgtcaagatgctgaaagccgatatcgccgccgcgagccgtccatgacgccctcggccctcgcctcgatcgacatcgggtcgacctacaccaagggcgccctgttcgccctggaggcgggggctttccggcttctctcccgggccgagacgccgacgacggccgacaacctggccgtcggtttcggccgggtccgggagaaactcggccccggcggccgagggccggaggaatttccggtttacttgtcctcctccgcccgaggcggtcttaagatcgcggctctcgggctgacggccgacttgactctttcgatcgcccggatggccgcgtattcggccggaggcaagatcgtccggacgtattcctatgagctcgcggccgacgagatcgccggcctcgaagccctccaacccgacatcatcctcttcaccgggggcaccgacggaggcaattcggccgtcgtcctccgcaacgcggagctcctgggccggtcctcgaccgccgcgttcatcctctatgccggcaacgccaaggtccgcgaccgggtcctggccttgctcgacggcaaggcggcggccgccaccgataacgtcatgcccgaggtcgggacgatccagatcgagccggcccgcgaagtcatccggaagatcttcctcaagcggatcgtcgacggcaagggactgtcgaccgtcgtccgcgagaccggtcgcgatccctggccgacgccgctggccgtcttcgagctcgtccgccggatcggggcctcccagccgggctggtccgatttcggtctcgtcgacatgggcggggcgaccacggacttctactcccacacggaggccttcaccggaggggattcggtcctgcttcgcggcctgcacgaaccccttctcaagcggacggtcgagggcgacctcggactccgcgtctcggccgccgccttgtgggaatccgagcgggcgtacttgacctcgcgcctggcggccgccggccgtccgatcgaggatttcgacgcgtacatccaccgcgtttccgctcaaccggagtcgcggcccgaaggcggcgccgagcgggcgtatgacgagatgatggccgccgcctgcgtccgggcggccgctctccgtcacgccggaacgctcagccgggtttacacgccccagggcggctttcacgttcagcggggcaaggatctccgccggatcactcgcttgatcgggaccgggggatatctctcccggaccgaaaacgccgcgattctcctggaggcctgcgcccccggccaagccgacgccgattcccaacccctgcttccggtttcccccgcggcttacgccgatgaggggtatctcttccccctgctggcgaacctggccggggattatcccgacgccgccgcccggacggccgtcggcggactccgtgttttaaaaggatgaacgcatgagatacgaacccatggcctggaaggatttcttgacccagcgcaaatccgttctggcaacctggccgaccggcaaggacgtcgacttggagggagggctccgctaccaacgggacattcccgaggcgaagaacttcgcccgggcgatgagcggggccaaggccaagggccggaccttgatccagccccgggcgggcgtggctctgatcgatgatcacatccgtctcctgcgcttcttggagaccgagggcacggccgacctgcttccgacgacgatcgacgcctatacccgccagaaccggtacgaggaagcggccgtcgggatcgagaaatcgacggccgccggccattcccttctcaacggctttccggcggtgaaccacggcctgggcggctgccgccgggtgaccgaagccgtgaccaaaccgatccaagtccgccatggcacgcctgacgcccggctcctggccgagatctcgctggccggcggattcaccagcttcgagggcggcggcatttcctacaacatcccgtacgccaagaaagtcgagctcggggactcgctccgggcgtggcgctatatcgaccggctggtcggctggtacgaggaaaacggcgtctcgatcaaccgcgagccgttcgggccgctgaccggaaccctcctgccgccgtttatcggacacaccgtggccatcctggagggtctcctggccctcgaacaaggcgccaaatccatcactctcggctacggccagggcggcaacgttctccaggacctggccgccctctcctcgctgcgggaactggccggcgaatatttcgaaaaggccggtttcaccgatttcgacctgacgatcgtttttcatcagtggatgggcggatttcccgaggacgaggccaaggcgttcgccgtcatcagcctcggctcgttcgtcgcggccgcggccggcgtggaaaaaatcatcgtcaagtcgccccatgaggccgccgggattccgaccaaggaagccaacgccgccggcctcaaaaccacccgccagattttatccatgctgacggaccaaataatctgcggcgacaacgacatcatccgccgggagaagaacttgatccgggaggaagtggcttgcttgatgaacgccgtggagaacgcctcgggcggcgacccgatccaagggatcgtccgggcgttcgccggcggcctgctggacgtgccgttcgccccgtccatcttcaaccgcggccgggttcttccggcccgcgacaacgaggggtttatccgcctcttcgccaaaggcaatcttcccttgtccgacgagatcatggccttccacaaggaacgcctggccgagagggccaaggccgaaggccgggcggtcaccttccagatggtgaccgatgatatctatgccatcagcaagagcaaactgatcgggaggccgaaatgaaaattgtcaaaacgctgttcgtgcccgggtcgtccgccttctatttcgacgaccagcgggccatcaaggccggggccggccacgacggatttttttacaccgggcagccggccacgccccatttcaagtccgtacgggtggccggagaaatcttgtccattctcctcgtcctggagaacggagccgtcgccggaggggattgcgccgcggttcagtattccggagccggagggcgcgatccgctcttcctggccgcggattacctgcccctgctcgagacgcgcatccggccgctgctcgaagggcgggagatcggaccgttccggacgatggccggggaggtcgaaaacctggaattcgacggcgtgcggctccataccgccgtccgctacggactgtcccaagccctcctccaagcccgggcgttcgaccgtcaccggctcatggccgagatcatctgcgaggaatacaatctcccggtcgtcgccgagcgcgtccccgtcttcggccagaccggggacgaccgctacgtcaacgccgacaagatgatcctcaaaggcgtggacgtcctgccccacgccctgatcaacaacgtcgacgaaaagctcggtcggaacggggagctgcttcgggcgtacatccgctggctggccgaccggatccgcgcgttccggaccgaaccctcctaccgtccgaccctccatatcgacgtctacgggacgatcggacaaatcttcgggctcgacccgggacgagtggccgattacctcgcctcgctcgaggaggattcggccgagttcccgctgtacatcgaagggccggtcgacgccgaggaaaaggcccggcagattgagcttctcgggaaggtccgggagactctccgccggcgcggctcctcggtcaagatcgtggccgacgagtggtgcaacaccttggaagacgtccgcgatttcaccgacgccgcctgctgcgacatggtccaaatcaagacgcccgacctgggcgggatccagaacaccatcgagagcgtcctttactgccggaggcacggcatggaagcctaccagggcggcacctgcaacgagtcggacgtctcggcccgcgcctgcgtccacgcggccgtggccgcccgggccgaacgtctgctggccaagcccgggatgggattcgacgagggctttatgatcgtccgcaacgagatggagcgcattctggcggtgcttcgggcccgccctgaggggaaataaccatgacttcccgtgaaaaagaattccgtgttctttccgccaccgccattctcggctacggctttccggagaaatcgttccgggccggcctggcccgcaaaccccacttgatcggagccgacgccggctcgaccgaccccggcccgtattatctcggagccgggaaggccttcaccaatcggtccggcgtcaagcgcgaccttcgttttatgctgagggaaggcgtgcggcggggcatccccgtggtcatcggcacggccggcggcagcggcgcccgtccccatgtcgattggtgcgaggcgatcatccgggaaatcgcccgggaggaaaagttgaccttcaccctgggcatcatctacgccgacattccgaaggagcgcatccggaaacaccttcgcaagggggaaatcgtccccctggcctacgtcccgcccctgacggaaaaaatgctggacgactccctccacatcgtcgcccagatgggcgtcgaaccgatccaagaggccctccggaggggatgccaggtcgtcctggccggacgatgctatgatccggcggtcttcgccgcccttccggtcatgcggggattcgatgagggtttggccctccacatgggcaagatcctcgagtgcgcggccatcgcggccaccccgggctcgggggcggattgcgccctgggcgttctccgcggggattccttcatcctggaaacgctcaatccggcccggacgttcactcccgaatccacggccgcccacaccctctacgaaaaaaccgatccctaccaccttccaggccccggcggcgagctggatctgaccgcctgcacgttcaccgccctgcccggcggccgggtcgaggttcggggaagccgccatgtcccgacgcccgaatattacgtcaagctcgagggcgttcggcggaccggtttccggacgatctcggtcgccggcacgcgggatcccatcatgatcaaggagatcgacgcgatcctggaagccgtcaccggccaagtccgcgacatcctcaaggctgagaaaatcgacggccgcatccagttccacgtctacggcaaggacggggtcatgggccccttggagcccgagacgaagatccggagccacgagcttgggatcgtcatcgaggccgtcggatcgacgccggaggcggccgattcgctctgcagcatcacccgctcgactctcctccattacggctacccgggccggatctcgacggcgggcaacctggcctttcctttttcgccttcggatgtcagaatgggagagacgttcgaattttcggtctaccacctgatgccgttgaccggccggacccctttcccggtcaagatcgtcaccatttgagacgaggagccgtcccatgaaacgcagcatattatccgtggccaaggtcatccggtcgaaaaacagcggcccgtacgagctgaccctggacatcattttcaaggaccggaaaggctatgacctgttccggcggtcgaacgccgtgaccaaggccacaatcgcccgactgtaccgctgccggcccgccgacgtcctcaagatcgtttacttcgagccggccaaggccctgaaggtcaccctcaagcggccgattccgtccggccacccgggcgagaccgacatctacggcgcccagcagcacgcgccgctcttgagcctgatgttctgacgcggaggaggccggacatgatgaagtccagtccgcagcggacggttcaccgggaaacgctcatctacgccacgtattacgccccgcgcggccggaaccgcctttacctggtcgcggccgagctgtcccagaaatacctcaccccgacggatctcgtgatcggcgtcctgggggcggagggctccgggaaatcgaccctcatcaaggggctcttccccggattggagctgaccaacgacgatgacgggatcaacgtccggccgacgccgctcatcgacttcgatcccaaggacgccttttccgggcacacgtttcacatcgacgtccgctacgagctggctttccaccagaagttcgagctggccgaggtcatccacaaggccgttacccacggccggcgggtgatcatcgagcatttcgacctggtttaccaagccctcggctacaacgcccaggttctgttcggcatcggcgaggagatcatcgtcgcccggccgacggttttcggtccgtttccccaggcgatcaaggacatcgtcgaccggacgatcaagtaccggctgatggcccactcggccgaagacatcacctgttcgatcttgaaacgggattaccatttcccgttccctccgctccactccgacgtccggcagggattcgtcctcaatttcaaccaccggcccaacgtcgacctcaaggagctcgagcgcaaggtcaacgaggtcatcgcccggaacgagccgatcgccgcctgcggcgaaaaccgcatccgcatcggccggcacgccatgccctgcaccgggacccggactcatgtgaaaacagccggagagatcgaaaacttccggcttctgcacgaataccgtttcgattcccggaccaaggagtactacatcgtcggcctggtggggcagaaatcctcggccgggttcgaggaaatgatcgatatcgaggagtatctcgaaggatatggagaataaggagacgagaatgagcgcccccaagcctttcaagcttttcccgcagcggccggaccggacgcgataccggcgggtttcggaccggtttgtccgccgggtgaagtgctccgggggggaggcgctcgccgtcgatcatgcgggcttggttctgctggccgcggaagctttttccgacctggccttttacctgcggccggccttcttgaagcgcatccgggcgatcgtcgacgacccgcgggcctcggacaacgagcgcttcgtcgccggggcgattctcaggaacgcggccatcgcgggcgagggcgttctgcccctgtgccaggataccggctcggcccaggtggtcggcttcaagggacaccgtgttctgaccgacggccgggatgaagaagccctgacgtccggcctccgggacgtttaccggaagcggaacctccggtattcgctcgtcgccccgctctccgttttcgaggaagccaacacggggacgaatcttccggcccaggtcgacctcctggcgtccgagggggaggaataccatttctatttcatggctaagggcggcggatcgtccaacaagacggccttgttccaggagtccaaggccctcctggaggaaaagaagctcgaggctttcctagccgagcacgttcgggcccttggcgtggccgcctgcccgccctaccggctggccgttgttctagggggactctcgcccgagatgacgatgaaaacggtcaagctggcctcggccggattcctggattccctgccgacgcggggaaagaaaagcggaatcgccttccgcgacgcggaatgggagggacggctggcgaaaatcgccgaggaaaccggcctgggcgcccagttcggaggccgtttcctggtccacgaggcgcgattcatccgcctgccgaggcacgccggctcgtgtccggtggggatcggcgtttcctgcaacgccgaccgaaactgccgggggaagatcaccgcggaagggctgtttatcgagcagctcgagaaagatcccgggaggttcctcgaggggattccctccggttcgacccccggagcaacggcggtcgatctggaccggccgatcgcggaaattctccgggacctgtcggccttgccggtcggaacgatggtccggctgtccgggccgctcgtcgtcgcccgggatatcgcccacgcccggatctggaagatgttcaaggaaacgggccgcctccccgactatttcaagaaccaccccgtttattacgccgggccggccaagacgccgcgggggatggcctccgggagcttcggcccgaccacggcccagcggatggacggttacctgccggccctcatggccgccggggcttcgaaaatcaccctggccaagggaaaccgttcccccaaggtcgtcgaagcctgccgggaacacggcggattcttcctcggaacgatcggcggcgcggccgccctgatcgctaaggagcacatcatccggagcgaagtcatcgatttcgccgacctggggatggaagcggtccgccggatcgtcgtcaaggatcttcccgccttcctcatctacgacgacaagggcggggacctgtacaaaaaataaatccttttcccgggagcgattcgcttgactttccgcgccggtcatggtctttgttttgtttgagaaggccggcgccggccgtttcaaggcggggatggacaacgcgcgggcgggatttccccaagccctcggggagaacggccgggcgcatcatctccggccgaaatgacggcgggaaggagacggatcatgagcggatcgaacgctccccgcgtcgaaaacaaggtcgatgtcccggcgttaaaaaagaaactgggaaggatgtatgtcctggccctggcggttctgggcctcatgctgttccttccggccgggacgctgcgcttctgggaagcctgggcttacctggcgatcctgttcattccgatggccggcgtcgggatctattttttcaagcatgatcccgaagtcatggaacgccgcctgcggacgagggagaaggaaaaaacccagaaaaaattctccctcgccggctttatcttattcgccgccgcgtttctcatcatcgggttcgaccgtcgttgggattggtcggccgtccctctggtcctggtcgtcatcgccgacgtcatggtggctctcggatacgggattttcgtcttggtgatacgggagaaccgttttctcttgcgggtcgtcgaggtcgaggccggacaaaacgtcatctccagcgggccgtacgccgtcgtccgccatcccatgtatgccggcgttctgctgctctacttattcacgcccttagctctgggaagcttttgggccttgatccccttcgggctcatcgcggcccttttccccatccggatcctgaatgaggagcgcgttctcctccgggacctcgatggatacgcggactacatgaaaaaaaccaggttccggctgatcccgggaatctggtgagagacggcgggagagcgccgtccgcggataaagccgggaggaaaaaatatcccccggcggagccggctcggccggccccgccgccgccttcgccgattggctcccctcctgggaaaacagcttcgcctccctggcccgcatccccgacgagctgagaatccacggggtgcgcctcgacggccgatgggtcgggtttgcggcttattatccggaattgcgctgggtgacgaacatcgccgtcgatccggcgttccggcggcgggggatcgccgcccgcctgatggaccgtcttctagacgatgtatccggcgggccggcgcccgttaaactcattaatgtggaagcggccgacgcggcgacggccgctttggccgaaaaggcgggattcgccgtctacgcgcggcaatacgagatggaacgggagctttgacatgcccgggcggctttgttaatctgacgataaatccccatgaaggcgacgagccccggccggtttttccgtcttgctgttttcgccccggcggcggccgctctctttgtcatcatcagtgtcttcccttatgaataccgcgattcggattcctcctgctacagctccctttcgcagaagctggcccggaggccgtacggggaatggtgcgcgccgcagtggggcggacacgggggcaacgaggggctttttttcgagcatccccccgggattttctggcttccggcgctcttcattcaagcgggcgtcaaggccgaccgggcggctctctgggcgaacttcgtatatctgctgtcgagcctgtttttgattttcaagctggctgagagacggggagattccctcctgggctggggggcggtctggggcgtcatcctgacgcccgcctttctccagtacttgatccgggccaaccaggaacctcctctggccctggccgtcctggccggaatctacggcttggtccgcctgcgggattctcgttggggcggttggctgttcgctgcggccctggtttcggccgtaatgatcaagggagtcagcgcggtttggctctcccttccggccgggttgttctggctgctggcggcccgcaaccggaagacgttttcttggatcgccgccggccatctgatcgccctggcggcggccgccttgttcgaggtttggttccgggaaacgactcagctgggcttttggtcgagttatttcgccgtccagggaggccggagcttgggcggggccttccgcccgcttcacgcggcctataatttcgcctggtacgcggcccgcattctttggttcgccgcgccgtggacgtttttattgatttacgacggggcggcgtccttgaggaagaaaaggccttttccgcgggatggattcgcccggttcctgctcctgtcggtcctgattgcggcggttcttttttccctctcggaccgcaaggcggaccggtatattttcccggcgtatccgcttacggccttagccggccttctcgtcttcttcaaggtccggccgaaggccgcggattatttggcgaaaggagaacggtggtttccggctgctttttccctcgctctcgtcgtcttgacctttctccggatctttttccattcccatctctatcgatacatgagaatctggccgcaatagccgagggagaacgcgccatgaactttcaggatctgatccgccgtcgctacagcgtccgggcctatgacccgcgtcccgtcgaggaagagaagctcgcccgtgttctcgaagccgcatgtctcgccccgtcagcctgcaaccgacagccgttccggatcgtcgttgtgcctacccggggccgggaagaggagcttggccgcgtctacgggcggccgtggttcgtccaggcgcccctcgttctggccgtttgcgcgcttccggccgaaagctggaggcggcggcacgacggctggtgctcggccgaggtcgacgcgacgatcgccatggatcatctcatcctggccgcggccgacgagggattggggacgtgctggatcgcggcgttcgatccgaaggccgccagcgaggtcctcaacctcccctccgaactcgtcccggtcgccttcactccgctgggctacccggccgactcccccggccccaaaaagcgccgtccgccggccgagctgatccgccgcggacgtttctgaccgtctgggagaccaggattaaaaaagaacgatggccaggtaaatcaagctcaggacggcgatgacgatggccgcgttcccggccgcccgcgattttttatccttctttgagaagccgccggccttggcggcccgccggatgatcagcgggcacaagacgagagtgttgagggccagggggatgaccaggaaaagcgaaacctccgtccattgcccgctgtggagcatttgagccagggccgcggagatccggctccatccggccggatcggccagcttgacgtaggctgcccgaaaaaggtcgaaggcgcgggtcaaaaacagcagggcgtttcccatcacgaggagaatgattccgacgcgggccgtgaaggcctcatgctcgggactgtgtttcttcatgtcggcggccatcagccggctgtggatggctccataggcgacatagatcacgaacccgaagttgagccaagcggcgaaccggagccatgacgtcggcggcaggtagaagatcagatacaggcaggacaggacgccgagcagggggaagatgatgtttcgggcgagggcgaagacggtcgcggccgcggccagaagaagaatcttggccggaacggacgcggggacaaacaggatcacgacgagggccacggccgcgtacatgatcccgctccagagccatccgccgggcaccttgaacggccggggacggcccgggtctttcttccgcaggacgatgatcccgctgcagacgaggatgaaggcaaacagcgttccgatgttggtcaaatcgaccatctcgtcgatgctggcgaaggcggcgaataaggcgacgaagacgcccgtcaggatggtcgccttgtggggcgtccggaatttcttgtggacatggctgaaggtccgggggaggaggccgtcgcgggacatgctgaagaagatccggggttggcccagctggaagatcaggaggacggccgtgtgggcgatcaccgagccgaaggcgacgatgcccacggcccagccgaggcggggggcggcgtgctggagggccatggtcagcggctcggcctgctcggaggccagcttcatcttgaggtccggggtagaaatcaggccggtgaagacagccgagacgacgatgtaaaacagggtgcagatgaggagggatccgatgatcccgatgggcaggtcccgcttgggattccgcgtctcctcggccacggtggagacggcgtcgaaaccgatgtaggcgaaaaagacgatggccgctccggcgctgatcccggcccagccgttgggggcgaacggcgtccagttggacggttggacccagaagaacccgacgatgatgaagaaggtcaggacgacgattttgatcccgaccatgacggcgttgaaccgggcgctttcccggatgccccggatgaggatgagggtgatgacggcgacgatccccacggccaggagattgaagatgatcggcacgccgaagacgtggggagcgtcccggaagacgaccttgaccccgttttcatccacgatcttggccgcggtcctatagtccatggacagccagtccggcacgttgatatggaatcccttgaggaaggtcttgaaatagttcgcccaggatatggccacggcgatgtttccgaccgcgtactcgatgatcaggtcccagccgatgatccaggcgacgatttctcccagggtggcgtaagaataggtgtaagccgacccggcgatggggacgatggatgtgaactcggcgtagcacagggcggtgaagccgcagaccacggccgtgatgacgaaggagatcatcagggccggcccggcgccggggcgatgagcgtcgccggccgcggccgtgccgatcgtggcgaaaatgcccgccccgatgatggccccgatgccaaagaggatcaggtgggcgggcccgagagtgcgcttcagcttgaattcgggccgctcggaatcctcgaggcattggtccagtgatttggtccggaagagcttgctgcgggcggaaagacgagccgggcggggatgggttccggcgggagacgggtccatggtttctcctcgcggaaaggggcggtccggcgcgggtcggaaggccgttccgtggactgaagccccatatcttagcaaaaaaatcaaggaaaagggaaaaaatccgccggccggctcttccgcgggattgtcaggggggcgggcgttttgatatgctttcccgtgatgtcattcccgttccattcgccgatgaggaggatcgcatgtcccgttcgaacgtcctgttttcgattgttttgatcatggccgcggccctagtcccgggatgcaagaagagcgagcccggacccgcggccgccgcccccgaattccgctggcaggtcgaccagttcgccgacctgaggatcctccgctaccaagtccccggctttgaagccctgacgccgtcccagaaggagctggtctattacctctcggaggcggctctctgcggccgggacatcgtctttgaccagaactaccggcataacctgacgatccgcaaaacgctggacgcgatcgtcgagggctacaaaggcgaccggaccgatccgcgctgggacaagttcatggcctacgtcaagcgggtctggttttccaacggcatccatcaccattacgcgacggacaagttcctgccggagatcgagccggactatttcgccgggctggtgaagggctcggaaggagcggcctttccggcggccgcggggcagtcgctggacgagttcatcgccttccttcagccgatccttttcgacccggcggtcgatgcgaagaaggtctcccaggattcctcgcgggatttagtggttcaatcggccgttaatttctacgaaggagtcacccaggccgaggtggagcggtattacgagaaggtcatcgatccaaaggacgaaacccccgtttcctacggcctgaacacgaaggtcgtcaagaaggacgggcgggtcgccgagatcgccgcctcgatcgacgggatgtacgggccggcgatcaaggagatcgttttctggctggaaaaggcggccggcgtcgccgaaaacgaccggcagaagcaaatgatcgaagctttgatcaagtactaccggaccggcgacctgaatgatttcgatgaatacaacatcctctgggtcggcgatctcgactcccggatcgatttcgtcaacggcttcatcgaggtctataacgacccgctggggcggaaagcgacctgggaatcgctggtcaacttcaaggacctggaggcgaccaagcgggcggacctcatctcggccaacgcccagtggttcgaggacaactcgccggtcgacccgaaattcaagaaaaaggaagtcaagggcgtggccgccaaggtcatcaccgcggccatgctggggggggactgctacccgtccacgcccatcgggatcaacctgcccaacgccaactggatccgggtcaatcacggctccaagtccgtgaccctggagaacatcacctatgcttataaccagtcctcgctggcctccggcttcggccccgaattcaccgcctcgcccgaggaactggaccggagccggacgtacggcgggcaagccggcaaccttcacaccgatttccacgaggtcttgggccacggctcgggccagcttctccccggcgtcagctccgaagcgctcaagaactaccattccccggtcgaggaagcccgggccgacctgttcgctctttattacatcatggatccgaagatcctcgagctcggcctgctgccgaacgaggacgcggccaaggccgagtatgacgccaatatccgcaacggcctcctgacccagatgacccggatccagccgggccggacgatcgagcaggcccacatgcggagccgggcgctggtctcccaatgggtctatgagaaagggatgccggaaaacgtcatcagccggatcgaaaaggacggcaagacgtatttcgtgatcaacgattaccggaagctgcggacgctctacggccggcttttggccgagatccaacggatcacgagcgagggcgattacgaggccgccaagaatcttgtcgaggcctacggcgtcaagatcgatccggaactccacgccgaggtcctggcccggtacgccaagctgaacttggctccctacgccggcttcatcaatcccgtctatacgcccgtcacggacggaagcggcaagatcgtcgacgttaagatctcgctgcccgaggattacgtcgcccagatgctggagtacggaaagaagtacggcttcctgtgattgaatatcagcgaaacggcaggtcgacgatccgccagaagccgttgtaaagctcgacgcttttccaggatgcgcccgtcgggccgtcccgtccctcgagctcggcggccagtcgctccccaagccggcgcatgcgttcgtcgctcttgaagccggccgaggcgaaaaggtttgttccgacgcgggcgccatccgaatgacggaggatgcgtccgcccgtctcgatcacgacaaggccgtcggtctttccggagacgggggagagagcgccgtccagcagcttctccggcgaaaaaagcaggctgacggagccgaggaacgccccctcgggtccgaagaccgggtattcggcgtcgccggcctcgatctcctcgacagtcaggaagattccggtcatgaccggttcgcggcgatccagcatcctcttcacctgctcctggccgctgatgtccttgttttcgtggtgacggtaggacgccggctcgatcgtcaccatgatcccgcgggagtcgacggcggcgcaatccacggccgaggggatggcgagataaagatcctcgagggctgagcgggcgtcgcatccggtcaagcccgacgctcccaggcgctcggcggcccggcgcagctcgatattaacccggttgaattcctccaagatcgctacccgggccgcttccagcgccgcctcggaatcggaagagaaaccggaacatccggcgggaaagaaagtcaggagaagggcgggaacgaggaaaagtgaagcgattaccgcatttttcatggtcagagcctccgattccaggcggattgaaacgccttcttattttataaaaaatacttgacaaataaaaatcgccggctatactgtgattgtgatatataaacagtataaacaaatgatacaagtagaacggaaggagccccggttttgaaaatcatcatttccaactcctcgcccgaccccatctacgagcagattggaaaacagatcaaggcccagatcctctccggcgacttggaggagggaagccccttgccttccatccggcgccttgcccaagacctccaaatcagcgtgatcacgaccaagcgggcttacgacgagcttgaagccgagggcttccttgacacggtggggggcaagggcaccttcgtcgccgtccagaataaggaacttctccgggagaagaagatgaaagtcgtcgaggaagcgctggcccgggccgtcgacgaggcccggctgatgggtatcgaagagagccaggtggcggacatgctccgtcttctgttcaaggagaatatctgatggccgccgccctcgaaatctccggactccgcaagtcctacaagggattcgccctcaaggacgtgtcgttcgccgtccccgagggctcgatcatggggctggtcggtcccaacggcgccggcaaaacgacgatcgtcaagcttatcctgaacttggttcggcgtcaggcgggggcgatcaaggtcttcggcctggataacctcgccgatgaaaaagcagttaagaaccggatcgggttcgtccacgagacgccggccctggtcgaggacgtcccgcttcgggatatcgcctccgtcgtggcgcctttctatccatgctggaaccccgccctgttccaagcgatgctccgggagttcgagcttccggccggaaagaaattcaaggccctgtcccatgggatgaagatgaaattttccttggccctggccctcagccacgacgccgaccttctgattctcgacgagccgacctccggcctggaccccgtcttccggcgggagcttctggaccgtctcgccggcgtgatccaagacggccggaaggcggttcttttttccacccacgtcacctcggatttggagaggacggccgattatgtgaccctgctgctcgatggagaagttgttctctcggcgccgcgggatgacatccgggataaatgggccgtggtcaagggcgggcccgagctccttgatcccgtccgtcgtcccctgttccgggccgtccgggaatcgccctacggggtggaggccttgacgggggatattccagcgtcccgggccgccttcccctcggccgtcttcgaccgggcctcgattgaagacatcatggtcttcctgcattccggagcttcccatgattaaactgttccgcaaggatttcattctccataagaaattcgccttgggagtcggactcgtctatccgctctatatcggttatatgggctcccggatcggccacacgacgctcctccccgtcctttgcgcgttcctctacgtcatcgtccccttcgttctattcggccgggaggacaagttcaaagccgaaacgttcactctcagtcttcccgtcacccgccgggaatacctccgggcccggtttcttctgagctggatattgatgctcctcatgttcgccgccggctccctcttgatggccgtggttccgggagcgaagcttccggccgcgacggttttcgggcctcgcatggttctttcctccctggccttcattgccgtctatttcggtttgttgatgcctttgttcgtccgtttcggccaggccgggctgctcgtttttctcgtcgttctgcagatcaccggcgtccttctcatggttttccgcagctccgtcggcatcggcttgatcaagacgctctttcgcctggttcctaacgcggtggccgaaattcaagccgctttcggcccggcgcccgccgtcttcgcggttctctccctcctggccctgttttcctacggctcgttctccctcagcctggccttgttccggaggaaggaatattaaggaggggccatggactgcgccctggaaatcaaggacctttccaagtcttacagcccgtccggccgcctgacccggccggcgcccgattccgccgggtcgggcggcgggtttcatttgaacgaggtctccttctccctgccccgggggtacatcatgggcttgatcggccccaacggggcgggtaaaacgacgatcatcaagctcatcctgaacctcatccgccgggacggcggcgaaatccgggtccttggcctggacaatatcgccggagaaatggagatcaaaagccggttgggattcgtccacgacacgccgtttttctacgaacacttgaccctggctgatgtccggaaaacagtcgccccgttttaccgggactgggacgacgcttgtttccggcggctggcggaagagttcgagctgcctctgggaaaaagattcaagaccctgtcgcgggggatgaaaatgaagttcgccctggccgccgccttgtcccacaaggccgaactgctgatcctcgacgagccgacctcgggcctggatcccgtcttccggcgcgaacttttaagaaagctatcggcttttatccaggatgaaggcaaatcggtcctcttctccacccatatcacttcggacctcgagcgaattgccgatttcatcactttcatccgcggcggccggatcgttttctcctcgccccgggaccggattctcggggcctgggttgtggtcaagggcgggccggagctcctggccgccgagaaccggcccttgttcaaggggattcggcagagcgcctgcggcgtccatgccctgacggccgaggccgacgaagcccgccggcggttcggccgcgaggcgatcgtcgaaacggccaccctcgaggacatcatgtttttcatgagcaagggaaacggccatgcttaagctcgtcgggaaagatctgctcgcggcccggtggattctgctctgtggagcggccgtcctatctctttactcgcttcagccgttcttttcggccggattcatcctggcggccggcggtgcgcttgccctggccggccaggcgacggtctttttcctcgaggatcggaacaaaaccgaaattctctatctcagcctccctgtctcgagagcgtcgatcgtcggcgcccgttatcttctgggagccgtcctgctggccgccggcggcgcgatggtcttcgggatcatcggctgggcgggcgccttgatgcacgttccgcgcccggccggcgggttccccgggcttctttcgatcgaagcggcggccttgttttttccgctgaccgcgtttttcctgtctctctaccttccgttctatcaccgcttcggcttcggccgcggaacgctcctgttcacggccgccggcgtcctttgcgccgcgctgggcgcggccgggctcaaggccgccctctcggacgccttcgcttcgggcggcggggaggccgttattttcggggccgtccgggttctccggctctccttggggacgcccctttttgtcttggccgccgcggcggctgtcttcatcccctttctcgtgtccctctttctttcgacgaggttttacgcccgccgggagttttaatcccggcggccggggggtatccgatgaaaaaacagactgcttccctcgctcttttcgttttgggcctgaatatcggctttctcttcgccccggcggggttcgcctgcgacacttgggtggccctcagggacgccgtgtcccgggggcgggtgctgtttgcgaaaaacagcgatcggacggttttcgacagccagccgctggcccttcatccgcggaaatcatggccggtcggcgcgatgatcgacctcggccgcgtttccatcccccaggccggggagacattcgccaccctcggctccggcccgtattggtgctggggatacgaggaggggatcaacgagttcggcgtcgtcatcgggaacgaaggcatttccaccaagccgttgcaggaagcgatcgccgccgcccgggaaagccggggaccgaagccgggcccgaccggaatggatcttgtccgcctcggcctggagcgaagccggacggccaaggaagcggtggaaacgatcgcggccttgacggaaacatacgggcagttcggctccggccttcccggccaaaggctggaaggcgcgtatgacaattcttatctcgtcgccgatccgagggaagcctggattttagaaacggccggaatccgctgggcggcgaagaggatcgagggcggaacggcctcgatctccaacaccctgagcctgggcggttcccttgacttgtcgtcggccgaccttgcggcccatgcccgggagaaaggctggtggacgggaagctccgaagccgcgttcagtttcgaacaggcatattcggccgagggacgggatcaagaaatcgcccgggagagagcccaagtccgggcgaactgttcccttgggcttctccgggaaaaatccggatcgatcgacgaatcttggatgaagcggatcgcccgcgaccggtccaccgacccgagcctggacctggatgcgacggccagctcctgtgtcgcctcgcttcccgccgacggcggcggactccccgttttctggtggtgcgcgtccgtcccctcaagcgggattttcgtcccgttctttgttcatggaacagagcttccggccttcctctcggccgccggaacggcggggaagcgcgtcgtcccgccggagacggccccgaccgaccggtattcgcccgattcctactggtgggtcttccgcgacttgaccgacctcgtcaatctcgaccggccgggccggctcgcggccgtccgaaaggaattcgacgctttggaacaatccttcgccgccgccctcccgcctgtcctcaagtcggccacggaactacggaaggccggaaagaccgtggaagcggcccgggtgttggacgatttctcggccgcctgcgtcgaaagagccgcggccgcggcccgggcgcttcgggattcctggaaaccagccggttcagacaaatcggcggcgccggaagaggcgggcgtctatatcgccaatttcggggctttcgcggacgcggaatggaacgtctcggcccgggacggccgcctgttcctggagatcccgggacagggcgcccttgagctccgtccgccggacgccgagggcttccgggccctcgccgcctctccccaagccggcgtttccttcagccggcggcccgaattcggcgtcacggccatgatcttccgccggggggcgatgtccttcgagctgccgcgaaagggaatcgtcctgccgccggagattcccctggaagagctccggaaatttcttggggagtaccacggcgacgagctcgacgaaaccctggagattgtcatcaagaacaacagcctggcgttgaaaatctccggacagaaaacctacgagctgcgtccccctgatgcggagggaaaacgatttttccgcgtggctcctttggtttacctggttttcaaagaatcggaaacgggaggcgtcgagtcttttacttaccaccaaggcccctcgtctttaacttatgagaaaatcaaatgattcagggaagccgggactccgggaattcattgatttcaatcaagaacgcttcagagggagggatttccccgcttttcgcggctgctccctccggcggccttggtggattcgtttttcgatgagaccgacgatcgtctttcagccggccggaggaaacgccgccgggacctctttttatgaatcgttttttttatcgtccctcccatgaggggggcgatgatcgggccgcttccgatgagggaagaagacggggcccggggcgtctaataagaagggagagcggtttctgttttccggccgtcccggccggctcccgaccatttcaatttcacgaggaggaggatccgcatgaagcgcgtcgtgacgctttcgctcgcggtgctcgtcctggccgccctcgccgcggccgggtcgatcaccctggacgtcaaggagcagaccctggggaacgggatgaaaatcctggtgatccccaatccgggcgtgccccgcgtcgtcggccatgtctattacaaggtaggatcgatcaacgagcggcccggcatcaccggcatcgcccacgtccacgagcatatgatgttcaagggcacgaaaatgatgggcgtgaccgatttcgagaaggatgcggccctcgaccggcggatcgacgaggtcatggaccaaatctaccgggaaaagtattggaagccggacggcgatccggccaaaatcgtcgagctccaaaaaaaagccgatgagctgaccgccgccgaaaaagccttcatcgtcaaggatgacctctgggagttgtacatgaagaacggcggcaccggcctcaacgcctcgacgagccaggaaagcacgggatattacgtgactctgccctccaacaaggtcgagcttcaaatgctcctggaagctgaccggatgcggaacgcttattttcgggaattctattccgaaaaggacgtcgtgatggaagagcggcggctgagcgagaacagccccggctacctgttccgggaacaagtcggggccgccttttacgccgcttccccctaccactgggacgttatcggctggatggacgacctcaagaagatgaccaaggccgacatgatcgaatttcacaaccggtactacatccccaacaacgccgtggccatctatgtcggcgacgtgaaacccgatcacatcttcgccttggccgagaaatatttcgggcccatcccccggggccccgacgtcgagccgatccggacgtcggagcctccccagtacgcggagaaaaggatgtacggggaaggtgccgctccgaccagccttcagatgatgttccatacccctccggccggccatcccgacgcggcgcctttgaccgtcctggccggcatcctcggcgccggcggcggccggggcggcttcggcggtccccgcggcggaggcggcggaacaggccgcttggagaagatcctggtccgggaaaaacagctggccgtctcggtcgcggcgttccaccggtcccaatggtacgtcggcgcgttccagttcagcggttcgccccgtctggacaaaggcgtcaagccggaggatctggagagagaaatctgggccgagatcgagaacatcaagacggacggcgtgaccggcgatgaaattcaaaaaatcaagaaccggagcgaggccaatttcgttcgcagcttgtccttttcggccggactggcgagcgccgtcggccgggccgagcttcaccggggctggcgctcgatcctcgccgacaatgaggccgtccagaacgtgaccaacgacgacatcaagcgcgtcgcggtgaaatatttcgtcaaggacaacagcctgaccgccgtctacacgcggacgacgggccggtaagggaggaaagcggcgatgaaaaaaacaatcagcttgatgatcggcgtgttcatcctcgtccttgcctcgggcctggctcaagtgacgaagccgtccgatttaaaattccccgccctgacctatgagccgcccgatcccaaggcgttccggacggtcctggccaacggcttgcgggggtatgtccaggaggaccggtccctgcccgcggtcaacatttccgccttgatcgatttcgggagtctctatgttcccgaaggcaaggagggattggacgtcctgctcggcgacacgctcatccggggcggaacgaagacccgcgagggcgcgtccatcgaggaacggatcgattttctgggcggatcgctgacattcgccgttggagaacggacctcgtccctcaacctgttcgtcctgagcaaggacctggacgagggcttggccctgttcttcgacgtcctgatgaaccccgaattccgcgagccgcccttcgccctggccaaggcccgggcgatcgagcagcttcgccaggccaacgatcagccggggatgatcctgaatcgggaatacgaaaagctcctgtacggccggcatgccttgacccgccggccgatgaaatcatcctatgagaatgtcaccccggccgaccttaaagcggtccatgcccgttatttcgtcccgggtaacgtcatcctggccgcctcgggggatttttccaaggccggcctggaggccgggatcaacaagatcatccgcgcttggaagggacggaagcccgcgataccggcgttttccaagtcgtttccgtccccggagccgggcgtctatttcatccagaaacccatcaaccaaggctacatcagtctcggtcatctcggcctcgaggacacccaccccgattacccggccgtgcaggtgatgaacttcatcctcggaggaggaagcttcacctctcgcatcacgaccaaggtgcgttcggacgaaggcctgtcctacaaccagggcagccggttcaccacccgctggggcttcccgggcacgttcgccggctacgttcagaccaagtcgtccacggtcggctatgccgtttccctgatccaggcggaattcaaccgcatccgactggagccggtcacggacgaggagatggacacggccgtcagttattacatcgacagcttctccagccagttcgagatgccccaagcgacgatgaccgctttcgctaacctggagatgcaaggcaagccgatgaacgagttcaaaaccttccgggacaagatcaaggccgtcaccaaggatcgggtccaggacgtcgcccggaagtacatccgcccggatcagatggtcatcctgatcgtcggcgacttcgagccgtgcaacgacggcggcgacaaatgggccggccccttggacaagctgggcaaggtccaccgtctcaatctcatcgatcccctgacgggcgaggagatcaaataaagggcggtccttctgattgatccgtcgatttcatcgtcccggggccccgaagggccccgggatttttttgggaagaggaaaactcggcctcgaggccgaggaggaatcatcgccggatttattcgcggcgtttgatcttgcggccctcagcccgagttcgaacagcctcagtcggcttggagctcaaccaattcctgctcgagcccggagacgagctcccggaagacattcacctcgggtaaagatagggcgtcgccgaggcggcaagcgctctcgaattcattcttcgtcttccgggaggggttctgggtataggcaaaagcccagagatccataagcatcaaagccgtttccctctcaagcgccatttgatttctccttgtcccttttcatacctgcaaggaatgtgccaaggagcgccggcccgggaagctgttttaaaagtccggattcattgacgcgacgctttttccgatttacccttatctcaaagggcaagaacggctcatgtcggctttttcgcttcggacacgaaaacggctggcggcggccctggtctttatgatcgcggggccggccggaacggatgtcgttttcgttctggaacaagaggtttcggatctcttccgccggatttacgaggaagtccagaccatgccggcccgtcccggcgaacgattcatccgccaggaattcttcatcggggagggcgacgacgacacgtataaggatatcgccgtctcgatcgtccttccgagggaagacgctccgccggacatgatcgtccagatcacttggatgaagcgcgaccgccgcgaccggcgggtggccgtggcccggtcgacgaaaaccttgcggtttattctcgaggcggacggcacccggctggaaggggacgagccggcaaacggcgagatcgccgtcctggcccgcggtttgttcacggctgtccggaacaaaaaacgtcttctggggaaggcgccgtcccggggcttccgggagccccgggaatatccataacgggctttccgggagcatctcccggattccctgatgtaaaattcgtttactaatcattaaagattgttttttttccgggtcgacgcgggttttcttccaaaaggactctgacgatcttccaggccccgcctttggccttggccggggtgaaaaaaatcgatgaaccgggagttgtcgctcctgacttaggccgtcgtttcggtcatgtcgaggatcgtgatctcgatgcggcgccgatcagcggaacgcggattccgccgcctcgctcggtgtattcgaggatgatgtccttggtcggctcggccgccttttcccgtccggtccggagatcgacttcaacaagcccttggccggccggggatgaagaccccggtccatgcgttcgacgcggccttcgaatcagccttcgagatcgtcgagggcggcccggtggacggccgattcttcggcttcccggggggaggagggcaacgccgcggccgacccggccacggcggccgggaggagaacgatcattcggggaatgctcctgtaaacagaagcaagagacatgccgatgatcggcggctcgagggatggaatccgagtcttgaggggatcctttagaccgcggcttccggattttcagcgaggatttgaatttgcttaggcgtaagcttgtggatcgtgatccccgtgtatccgtagaagatggagacaaggggattggacaggttaagaaaggcgaagggaagatagagcagcgggctgatgccgagagtcgctcccatgaacgccccgcagctgttccaggggatcaggggggatgtcagagtggccgaatcctcgagggcgcgggagagattttttggatggaggcccaatttcaggtaagccgaccggtacatccggcccgggatgacgatggacatgtactggtccgaggagatggcgttcatcccgatgcagctcaggatagtcgtggccacgagggagccggcccggcggactcttttgagcagagccccggccacggtctggaggatgcccgttttttccatgatgcccccgaaggtcagggcgcacatgatcagggccacggtgctcatcatgctgtccaggccgccgcgggtcagcaggtcgtcgaccaggggaacgccggtggcgctgacgaatccggacttggcggtcgtgacgacctcggccagcgtccgtccttggaggaccaggccgaagcccgccccgagaacggtcccgccgaggagggcgggaagcggcgggattttcaggacgaccatgacgatgaccaggatcggggggagaagcagaagcggatggatctgaaaatgcgactcgatcgtccgggagatcaggctgatgttgtccgaggcgatgcggcctccggcgaaccgaagcccgagcagaccgtacaagacgagagagatcaggtatcccggcgtcgtcgtgtagaccatgtggcggacatggctgaagatatcggttccagcgacggcgggggccaaattggtcgtgtcggagagcggggacatcttgtcgccgaagtaagccccggaaatgatggctccggcgaccatggccgggggaatgcccagcccttgtccgaccccgaccagggcgacgcccaccgttcccgccgtcgaccaggacgatcccgttcccagggaaacgatggaacagatgatgagcgtggccgcgagaaagaggccgggcgagagaatcttgagcccgtaataaatcatggccggcacgatgccgcccgagatccaggttccgatcatgatcccgacgatcatcaggatgagaatcgcccccatggccagagtgatgccgtggatcatgccgtcctggatggaagcccagctgtgtccgtggcataatccgacggcggcggccacggcggcggccgcgatcagcgggatatgggcgtcctgtttcaggatgatgattgtgacggaaagggcggcgatgaggaagagaatggggatgagggcggccccgagacgaaccggccggaccgatcgcgtttgcttattcacggcgtcgggcatgaagagccattctaaataaagggcggggaaaaggcaacctttgggacgcggccgggccgtcccggtcgaaaacgcgcggcggcctacggattgaggaaataggccgcaagaaggccgatgatcgcgaagatgatcacgatcaggaaaatccagcgtctatttttgaagagctcctcggccgcttcctcgtccaggtagaaacggtcgttaggcgcctcgacgaggatctttttcttgatcaggctcttgacagcgacccgcttcctgatgttcaacgattccaaggtcatcgcttggcgcggatcggtcgcgcactgatcccggaatttgccgatgattttcttctggatcgcgaaaacgatcgcggctgaagctccggccatgtcttcttctccttctgaatccttatacggatttccccccggcgggttgtctcttcgtcgggatgcgccgcggccgccgcggcggtctcacccgtccagacggtcccaggtccggggaacggccggcgggaatgtccagagggacaggccgtcccggtcgccggcgtagaggccgccgggaacgtcgccgcggtatccggcccagtcccggaaaggaacgtcgttgagacattcgccgaagacgatgctcttggtctttttggacggatcggcggccagctcctcccgggcgtcgctgaagcggctggcggccgcgatctggggttgttccgcagccagttcgacgaacatcagccggcggaagatctttcccgggcggtgggtcgcgtaccaggcgtattcctcgggcgcgaggttcgtcaggagaagaaattgaatcggggcgagaatcatgaagagccggggcgcccggctttccggaaccgggcgatcgatcgaccgggccacctgggcgggcgtcatctcttcgtggcagccgtgcttgaggtagtcgatcaggcgccgcggcggggccagcgggaggaccgccccgcccgtcttgaccaggaaaatcccgcggtaggcgtcgagcggcgtgatgttgaagccgtcgttggatagggccgtcttcgttcgtttccccgagcggacggcggccagggcggccgcggcgtcgccggcggcgtcccgccatccgccttcttcataaaatcggaaggccggccggtcgccctcgagggcgaggtcgatcatgatggtcttgccgcggaaatgcttccccgagccggggctccgatgtcgcgcgtacccctcgaccccgaggctcgtggccgtgacgctgccgttggggatgttgagaatgagattgatttccgtgcgcatggcgccctccttttctgctggggacggctctcttttccgaagctgatcgaaagatatcttcagccccggcgaaagtcaagaaacggcggacggcgttgcgtccggacgcgccgggccttcccatcgacggccgtttcgccggccgccgctgaggggatccggacgcgcggtccgtcgcggccgatcttttaaccgttgccccggccgcttcgaaccggccgagcaggccctcctccggggcggtcaagcggagcggcagaggattccgccgtcctgtcggacggattccaagccaggtccgccgccgggaagagaagcgagggcatggcgggggcgaggcggagggagcgattcggagacgaaattcttctggatggacgccgatttctgcccttatgacggcaaaaatccggttgttggagccttgtaataatccattttctatatcatagtaaaccgcgaggcgtctgttctccgctttgcgagtttgcaccgggaggatttccccatgaaaaagtccgcggcctgcgccgggctggtcctggcggtcctgggaggcgccgcctgcgcgaaggcgccgtcccccgattactccatcaaggatgttcctcttgcggccgtccggttcaccggaggcttctgggcggaacggcagaaaaccgtcgtctccgtcaccatccgccacgaaatgaaggaatgcgaggagaccggccggctccggaatttcgacttggccgcggccgctctcgggggagagcccggcggacgcttggcctcggtttatcctttcgacgattccgacgtgtttaagctcatcgaggcggcctccgatgtcttgatgcttcgtcccgacccggacttggagaaagacattgacggctggatctcccggatcggggccgcccaggagccggacggctatctttatacggctcggaccattaatcccgcggctccacccgaaatgtccgggccggagcgctggtccaacctctcgatgagccacgagctctataatgtcggtcatctttacgaggcggctgcggctcatttccaggcgacgggacggcgcgtccttctcgatatcgccttgaaaaacgccgatctgatcgaccggacgttcggcccgggcgaaacgcagctcaagagcgtcccgggccacgaggaaatcgagatgggactggtcaagctcttccgcctgacggggaagaagaaatacctcgacttggcccggttcttcgttgaggagcgcggccgggcttccggccggaagctttacggggagtattcccaggatcacaagccggtcctggagcaggaggaggccgtcggccatgccgtccgggccgcctatctctattccgggatggccgacatcgccgctctcaccggagatgcgcgctatgtcgccgtcctggaaaggatctgggaggacgtcgtcggaaggaagctttacttgacgggggggatcggttcggccggagggatcgagggcttcggaccgccctacgagctgggaaatgatacgggctacgccgaaacctgcgccacgatcgccttcgccctttggaatcaccgcatgttccgtctcaccggcgaggcgaaatacatggatctcttcgagcgggcggccatgaacgccttcctttcaggcgccgggatgagcggcgatcttttcttctatcccaatccgctggcctccgacggcgggacgcggcggacgccctggttcaaatgcgcctgttgtccgcccaatgtcgcccggttcatcgccgggatgggcgggtacgcttacgccgtcgccgacgacaatgtctatgtgaacctctacggccggagcacggccgagctcgcgacaaaacgcggcctggtccggctgacccagacgacggactatccgtgggagggagacatcgagatcgaagtcgcgccggacggcccggccgcctggacgttgatgctccggatccccggctggtccctgggccggccgcttccgggcggcctttattcttacctcgacgccgctcccggaacgccttcgatcaaggtcaacggccgggaaactgccgcggtcttggacaagggctactgggcggtgagacggacatgggcccggggcgatgtcgtcacgctttccctcccgatgcccgtccgtctcgtccgggcgaggggggaggtggcggccgacgccgggaggatcgcggtcgagcgcggtccgctggtttacgcggccgaggcggtcgacaacggcgggacggtctccaatttgcttttcgatccgtccgtgcttccggcgccggagttccggcccgggcttttaagaggcttgaccgtcctcgccggaaaggcgacggccttccggatgaagaacgggaaggaagacgccgttcccggcgtcctgacgctgatcccgtactacgcctgggcccatcgggacgcgggcgggatggcggtctggctcgcggccgagaaagacaaaatccgtccgtccggagggggcgcggaatccgaaatatgaggaggcggcgatgcgaaagagaacaaggggaggagcggccctgatgatcgccctggcggcggcgggcggcgcggcaacggctgatccggattatcccctccggccggtgccgttcacggccgtccgcctcaacgacgttttctgggcgccgcggatcgaaaccaaccgggccgcgaccgtgccgttcgccctccggatgatcgaggaaacgggacgagtggacaattttcgcaaagccgccggaaaaacgcccggatctttcctgggaaagcgatacaacgattcggacgtgttcaaagtcatggagggggcggcttacaccttgatgctcaagcccgatccggcgctggccgagacgctcgacggccttatcgccgtgatcgccgccgcccaagaaccggacggctatctctacacctgccggacgatcgatccgaagaatcccgctcccggcgccggggccgagcgctggtccaatcttcgggtgagccatgagctttacaacgtcggccatctatatgaggccgccgtcgcccattaccaggcgacggggaaacgcgcgttcctggacgtggccttgaaaaacgcccgtctgctcgcgtccgtcttcggcccgggcaagcggcgcggctttcccggccatccggagatcgaaatcggcttggccaaactctaccgggtgaccggcgaccgtgcctggctcgacctggcggaattcttcctggacgagcgcggccgctcttttcaaggggaaaagtacgcccccgatgacccgttcagcgtctataactccgaggagtatctcctgaaccacaaacccgtgccggagcaggaggaggccgtgggccacgccgtccgggcgatgtacctctacgccggaatggccgacgcggccgccctcggcggccgcccggactacatccaagccatcgatcgtctgtgggccgacgtggtcggaaggaaaatgtaccttaccgggggagtcggcgcccgggccgaatcggaggcctttggagctccctatgagctccccaatcggacggcctatgccgagacgtgcgcggcgatcggccacgccctctggcagcagcgtcttttccttctgcacggcgaggcgaaatacatcgacgttcttgaacgcgtgatgtacaacggcctgatttcgggcgtgggattggacggcctgtcgtttttttatgagaatcccttggaatcggatgggaaaacggctctctaccagggacaggccggccgatccccgtggttcgaggtggcttgctgtccgcccaatatcctccgtttcctgccctccgtccccggctatgtttacgctgtcggcgatgattccctctatgtcaatctgtttgcggcgaacacggcggtcatcgacctggccgggatgaaggtgggcctggcccaggagacgaaatacccgtgggagggaacggtcaagttgaccgtttcgcctgaaaaggaggcggacttcgccctccggatccggattcccggctgggcccggaacgagcccgtccccggcggcctctaccgcttttgggatgaaagcgcggaaacgccgaccttgacggtcaacggcgaagccgccggcctcgtcctcgagaacggatacgccgttctccgccggacttggaagaaagcggacgtggtcgagctgtcgcttccgatgccggtgcgccggatggcggccgcggcggcggtcgcggccgacgagggccgcgtcgccttccagcgcgggccgctggtgtattgcgccgaagccgtcgacaacggcgggcatgtcctcgacctgtcgatcatggacggcgcccgcttttcggccgagtttcggccggatctattgaacggggtcgtcgtcttgacgagggaagcgcttcggggaacgatgcgtctgggcgcggtccgggcccgggacgtccttcttgtcccctactatgcctgggccaaccgcggcccgggcgagatgcgggtctggttcccccgggattagccttgggaggggggcgcggcctgttttccggtcttcggcggaatccctgttgattttaaaaagcaaatcgatataattaataggaatattcggaagacgtttcggccggatccaaggagcggattccatgcgaaacctcgtcattctcggagcggggacgggcggaaccgtcatggccagccatctccgaaagcgcctcccccggggggagtgggccgtgacggtcgtcgaccgggacaatgagcattactaccagccggggtttctcttcattccgttcggctttctccggaaaaaagacatcgtcaagccccgatcgaagttcctccccaaggagaccgagttcatccaagccgaaatcgaccggatcgtcccggcctcaaacgaagtcgtcctgagggacgggcggacggttccctatgattacttgatcgtcgcgaccggggccgagattgttccggccgaaacgcccgggatgctcgacggctggggggacacgatcttcgacttctacacggccgacggggccgaggctctggcggcgaagctcaagacgttctccggaggcaccctcgtcgtccacgttaacgaaacgcccatcaagtgtcccgtcgctcccttggaattcgcttttttctgcgacgcctgtctccgccgccacggcaagcgcgacaaggttgacatcgtctacgtgacgcctttgccgggggccttcaccaagccggtggcggccgcggccctgggggctctcctggagaagaagcgcatccggatggtcgcggatttcaatgccgagcgcatcgatgcatcggcccggaaaatcatcgggtatgacggccgggaggtgccctatgatctccttgtcaccgttccgacgaacatgggcgcggagatgatcgaacgctcggggatgggcgacgaattccgcttcctccccaccgatccccgcacgctgcgctcgaaaaaacatgaaaatatcttcgccctcggcgacgccacggacgtccccgcctccaaggccggctccgtcgtccacttccagtcggagatcctgacggagaacattctccgggcgatcgacggccggcctctcgagccggccttcgacggccatgccaactgcttcatcgaaatgggccggggcaaggctatcttgatcgatttcaactacgagacggagccgctgcccggccggtttcctttccgggtgttcgggccgctccccctgctcaagcccagccggctcaatcactgggggaagctggccttccgcgggatctattggcgcctgcttctccgggggaggaggatcccgttcgtcccttcccggatgaagatgaccgggaaaaagcgcccggcggccgctccgggcgcttgatcgcatcgccgatgaaagaaggagatacgccatgcctctcaaaacctatgggaacaccacggtcgacgtcgacgccgagggttacctgactgatttttcccagtggacgcggaccgtcgccgaggcgatcgccgcggaagagggtttcgccgccctcgggccggctcactggaaggtcatcgagttcatgcagaaggaatacaaggagaacggccaggtcccgagcatccgccggctcaacaagtcgggggtcgcctccaccaaggagctttacgagctgtttccgggcggcccggccaagaaggcggcccggatcgccggcttgaaaaagcccgagggctgcgtctgattctccggccgtttcgaaaggaggagccatggaagacaaaatcaagaaggtctcgatcattatctccaagggagggctggagggcgtctacccggggctgatcatggccaacggagcccggatggagggcatcgaggtcaacctgttcttcacctttttcggcatggacgcgatcatcaagaagagaatgggccggatcaaagtcgccacggtaggaaatcccgggatgcacatgcccagccttgtcggcattctgccgggcatgtcggccatggccacctccatgatgaagaagaccatggagaagctcgacattccgcccgtccccgaatacatcgagatgatcgccgacgccggcggcacgctctatgcctgcaaggccacggtcgacatgttcaagctcaagaaagaggatttctgcccccaggtgaattcgatcatcaacgtcggccggttctatgagatctcggccggcggacacatcatttttacctgacgcgccggacgctctgtacgaaccggccggatccagccggtccggggaacgccgagcgtttcgtccggtttcccatgaggagcgaccctccgctttaacgtcttcctccccgtcccggaagacgggaggggaaagggggggcgttcccatcccggcccaaatccggcccgggagaacgggcaaaagacctccctggaaaaaataaaagccgattcgtttgggcgaaatcgagagccgctgtaaaaaacgaagtcgccttccgcggggggaaccgtaggatcgggcaagctctccgccccccggggctcggcaaacatctccggagggatcagcccgggattcctcgtcatcgaaacgccttcgccggattgacagccgcctccggccggaataagattccggtcgatatgttcccctcccggcgtcccttttcttatccctttccggacgctcccggttttccatgacaaggaggacatgatgcagaatcccggctcgctgatgtcgctcaacggcgtcgatatggccatcgtcgccctctatttcgtcgtcgttctggcgatcggcttctatcttaagcgcttcaccaagacgggcaatgactttttcatggccggccgggagatgacttcctgggtggccggcttgagcttcgtcgcggccaacctcggagccctggagctcatgggctgggccgcgtccagttatcaatacggcatcctggccgcccactggtactggatcggggcgatcccggcgatgctctttctggccatcgtcatgatgccgttctattacatctccaagacgcattccgtccccggataccttcagttgcgctacggaaactcaagccggagcctttcggccttgtgcttcggggtcatgaccgtcctgatgagcggcatcaacatgtactccatggccctcgtcttgaaagtcgtcctgggctgggacatccatttcagcatctgggtgtcctcgatcacggtggccctgtatgtcgccctgggcgggcttctttcggccatcttcaacgaggttctccagttcgtcctcatctggctgggggccctgctcatccccatcatcggcctgatcgaggccgggggttgggggaacatggtcgccaagatccagcagaacttccagggggattacacgcatctctggcggagcatcggatcgttctccgacaatcccatgggaatccattggacgggcatcgtcttcggcttgggagccgtgctctccatgggctactggacgaccgattttctcgtcgtccagcgggtcctggcggccaaggacctgcgctcggccaagatggcgccgatcatcggggcgggcttcaagatgatggtcccgttcatcgtcattctccccggcctcctgggcctggccgtcatgcccggcctggtgggtgaggcggaagccttggccacgggcggtcacagctacaacgaggtcctccccttgatgatggggcggtacctcgggccgggccttctcggcctcgggatcacggccctgatcgccggattcatgtccggcatggccggcaacgtcagcgccttcgccacggtctggacctacgacatctataagccgctccggaaaaagccgctcagcgacggccatttcgtctcggtgggccggtggtgcaccatcctgggcgtcctggtcagcatcggcacggcctacctggtgatggaattcgccagcatcatggactatgtccaggctctcttcagtttcttcatcgccccgctgttcccgaccgtcctcctcggcatgctctggaagcggaccacctcggccggcggcttctgggggctgctggccggaacggtctcatcgatcgggatgtggatctgggtcaaggtcgatccctcggccctccggatcatcgccctctcgcccggggccaaggcgatggccgagaacatgtaccgggggctgtggagctgcttgatctgcgccggggttacgatcgcggtcagcctgctcacgaagccgaagccggagagcgccctcaacgggctggtccgcagctgcacggtcctgccctcggaaaagcacttgaccttgttccggcggccggccttctgggccggcgtcgtctttgtcgtctttgttttccttaatgtcctcttctggtaaggagccggcccatggcgaaaaaaatgatttccatctggttcttcatcgggctgcttctgaccgtttacggcgttctcatcctcggggccgggatctacgatctcattgttccgggccgccacaacgtcgtcctgcgtgaattgcacgccggggtatggtggggggccctgctgatcgtgatcgggatcgtctatctcgttttcttcaggccgaaacggaccggcaagtaatcccggtccgcggccggagcggcgctggcggcggccgccctaccggatgtatcccagggcccggagctgttcctccaggctcttgtccacccgcgaatgcctgccctcgccgcgcgggggaatgaggcggtcggtgtcgcgggctttttgcaccaagctccggatccgggcgggatcgtccggatggtcgaggatgtttgttttttcgccgggatcgcgggtgagatcgtaaagctcgacggccggaaaggccggcgggcgtgccgtgaagaaggccatgttttccggggagaaggggcggttcagaatgactttcgtccgcccgtcgttcatggccaggcgctgggggatctggcagttgaggatgttgtcggccagctcggccaggaagacgcggtcggccgtttctttctccttcaggaccggacggagactttcgccgttgagggagagatcccggaatggaaggccggcataatcgagaatcgtcggcatcaggtcggtcaggcggacgacgggggaccggcgcgttccccggaattccgagcccggcatcttgacgacaagcggtacgcggatcagctcgtcgtagacgctgtgggagtggttccagcccccgtgatcgaaaaactcctcgccgtggtcgctggtaacgatgatcatcgtccggtcgtagagatcgagccggcggagggcgtccacgacgggctggacgagggtttcatcggtgaaccggaccccggcgtcataaagggcgatcacgttgtggcgatcggcctcgctgagctccgtgtaaacgcccgccctccccccgaccaccttgttgatgtcgacccggctccagcgggcgtccgggcggaggaacatcgtccggtacggcatcgggcttttgtagggggaatggacctggtaggtgtgaaggaagagaaagaacggccggtcggtgtttttttcgatccaccgggccgcgtcatctccggccttggccgcttgactcgtgtccatgaggtcggcctggtcgagatgatactcgtcgaagcccttggcgaatccgtagatcgggctgacgaagccgccgccggtgatcgcccaggtcgcgtagccccgggcccgaagccgctcggccagggtgacggtctggggatccatccggtcttgctcggcgtagacgcgatgcctgacgcaattgaggccggtgagcatggagacgtgggccggcagcgtccagggcgaggtggaataggcgttttcgaagacgacgccgtcggccgccagggcgtcgatccggggcgtgagcgggcgttcatacccataggctcccacgtgatcggcccggagcgtgtcgatggagatcaggacgatgttgggagccgttttttccgggatgtacaggacgggctggatccagtaggaaaaaacgcccccggggccggtcgtgacgagcctcaatccggcctcgcccgtccggaccggaagagggatgcgttcccggagctggttgatcgtccgggacgtccgggcctcgggctgtttgaggttgcgctcgtacagaaccgtctcgcggccggcattctcgaggatgatctggaacttgacttcgccgcttggggatccggcggcggcgagccgggcggccgagtggacgtcatggacgatcccgatcccgaaatccaggacgccctcggtcttgaagggaagccggtagcggagctcgctccggggcggggcgaagaggatgtccatcgacagcaggcccagggctatttttcgcttcaagccgaacgcggattcgccgacgccggtttcggtcatgacggcggagttgaccgggtaggcccgctcgcccagggccgcggcttccgggtttttcagcgggctttcgagaactccggcgcttgtcaggccgtcgatgaagcggaagacgacgggcccggccggggatttcgagcggcaagccggcgcgcagcacgccgccaaaatcagggcgggaacgagtgtcccccggaggccgcgcgaacgatgtgttttcaaggggggagatgatagcatattttctcttcggtccaaatacgccttattcgacgggccgattcggtgtattgagtaaaaatcgtttgaccgttctcttttttccacatagaatggcttctttgcttttgactcatcccgcctgaggagagatcgcatggatctgcaaaaaatcgtcgacgcggtttacggatacgtctggggctatcccctggtcatcttgtgtttgggagcgggcatctttttttcgatccggacgcgttttctccaggtccggttgatcaaggacatggtcggccagctttggaggggaaggtcctccaagaaaggtgtgtcctcgttccagggcttcgccatggccctgggcggccgggtcgggacgggaaacatcgccggggtggccacggctatcggcttcggcggacccggggctctcttctggatgtggatgctggctttcctgggagcgggctcggcctacatcgaatcggccctggcccaggtctggaaggaagagatcgggggcgtctaccgcggcggcccggcttattacatcgaaaaaggattgggtcaaaaatggtacgccgtcatcttctccattgtcaccatcctttcctgcggcatcctcctgccgagcatccaatccaattccatcaccgtcgccttccggaatgtgatcccgaagctgtccccgtccgcttcggggatcatcatcgccgccctcctcgggctgatcatcttcggcggggtcaagcgcatcggcaaagcggccgagctcatggtcccgttcatggccatcggttacgtcatcatggccatcgtcatcatcatcctcgacctcaagcggctgccggacgtcctgcagatgatcttcgcttccgccttcggagccgacgccgtcttcggcggcatcgtcggctcggcgatcatctggggggttaagcggggcattttttccaatgaggccggacagggctccgggccccaggccgcggccgcggccgaggtccggcatcccgcccagcagggcctggtccaggcgttctcggtttatgtcgacacgctgtttgtctgcagcgccactggattcatgatcctcctgaccggaacgtacaatgtcgccgacggcaagggcggtcagatcgtcaacaacattccgggcgtcgaggccagccccgtctggacccagatgggcatcgacaccctcattcccggattcggcagctattttgtggccgtcgccctctttttcttcgccttcaccaccctgatggcctacgccttctacacggaatccaacgtcgcctacctctttaaaaagaaaagcctcccggccatccaggtcgcccgcgtgttcatcctggtgatgacttttttcggggcggtccgttcgacgacgctggcttggaccctgggcgacatcggcgtcggtttgatggcttggctgaacatcatcgccatcctcttgttgtccaaggtcggcctggccacgctgaaggattacgaagcccagcgccggaacgccggaatctatttcgatcccgagaagctgggcattaagaacgccggcatctggacgacgatccgcaagcggtatgaggtcgaggacgccgaatccgggaagtcataaatcctccacggccgttcgccggcgcccccttcttcggcccaattgacgcggtcttatcccgtctgaacgcggacgtttatcccgattcttcccaggcttgcctgaacccggcttttctctacgagcggatgaaagaccggctgaaggccgccgcgtattatgagaaagccgccgcgaaagccgccctttcccagccggaagccgcggcttactataaagcgcaagccgagcgcttgaggaagaaataaacgctcccgttccctccgtgaaaagaggaggacctcatttcatcaggttgagaaagaccgtgatgatgagggcgttggtgaaatcgatgaaaaaagccccgaccatcgggacgaccagaaacgcccggggcgcccggccgtacttgtcgacgaggactttcatgttggccatggcgttggccgtcgttcccatcatgaagccgaaaaatcccccggacatgacggcggcctcgtaatccttgcccataaacttgaaaacgggcccaagacagaacaggacgagaagaacgacctggccggcgagaacgacgaagaggggaagaacgagtccggccagctgccaaagcttcagggtcatcagggcgatgaccaagaacagcgagagggcgacgtggccgaggtcgtcgagcgtccgctgggaaagaccgaacacatgcgtcaggtcgtccagattccggatgatcgcggccgtgaacatggctccgatgtaggccggaagggtgatgcccagggcggcgaaaccccggctgacccaggacccgatccacatggcgacgagcaggatgaccaggcttttcagcaggatgtaagcttccttatcctcgccgcccggggcagccgtttcggcctcggccagcttgtcctcgacgacctgctcggcgatgaccaccggcgcttctttccgtccggcctgggctttccgcagcttgttccgttcgatgagacgggtggccaccggtccgcccatcaggcctccggagacgatcccgaacatggccgcggccacggcgatggtcgccgctccgtccactccggcctgctcgaacaggggggcgaaggccaagcccgtcgccggccctccggtcagggtcaccgagccgctgaggactccgaaaagaggatgcaggccgaagagaacggcgaggcccccgccgaggatgttctggaagacggccgccaccgtggcgatgatgaagaacaggacgacctgagggccgccgatcttgagcagggagaagctggctccgaatccgatcgtcgtgaaaaaggcgatcataaggggatcgcggagcgtcgtgtcgaacgagatcagcgtcgccccgttctggtgggcgatcaggacggcgacggccaccagcaggccgcccacgaccggggccgggatgttgtaccgggaaagagggcggatccagcggcagagggcgtatccgatgaagaggacgacgccggcgaaggcgacggtctggatgaggtcgagattcagcatccgatgattcctttcggcccgccgatcaggcccgggctttcttcccccgggctttccagaagaaatagactggaattccggccgcgatgaggcccaagccggcgaacgagttccaaaacgtccggacgagcgaattgacggtcaggaaggccatcgccaggatgaacaggaggggcgtgaccggatatccccaggctttgtagggccggggcaggccgggcctcttttttcggagaacgatcacgccgcccacggccaggcccatgaagatccagtatccgaacatgacgaacgtgaaaagctgttcgaacgtcccgctggtgcagatgacggctccccaggcggccaggacgacgatcgccacgtggggagttttgtatcgcgggtggacccgggccatggaccggaaaaaaaatccgtctttagccatggcgtaaaagacccggggggcggtcaacaggtggccgttgcaggtcccggtgatggacatcaggatgatcagggcgatgatcgacgccccgaccggtccgaccgcggcctgcatgacgtcggcggcgatgtgcggcgactcggccatgacgggcgcggggaagacgtagagataggcgaggttggccgcgatatagagaaagacgaccgcggcgatgccgagaagaagtccgaccggcagcttcttttgagcgttgcggatttccccggcgctgtacgagctcgtctcccatcccttgtacgcccacaaggcggcgatcagggcgacgccgaaattgctcaggacgtttccggccggccccgctccggagggagccgagagaaaattccgcggcgttcccttgaccaggaggaagacaaggacgcacatgccgatcagggcgacgaacttgatgaccatcaggaagttcatcaggcccgcgcccttgcggacgccccggtaattcacggcggccagggccaggatcagtccgatcgagacgatcttggactgccacggcgacaggtcgacgaaataggggagatacttggtcgagaagcccacggccagggaggccaccgtccctgattcgatgacgatgaacagcgaccagccgaagaggaaggcgaccatcggtccgtacgcttcgcggagatagacgtagattccgccggcgtgggagtaggcggcccccagctcggacagagacagcgccccgaaaagagtcagaaggccgccgacgatccagacggccatcatgatctccggcgttcccacgaccttggccacgttgggcggattgatgaagatgcccgaaccgatcatcgtcccgacgacgatgccgatgatgctgaaaacccccagaacgcggggcagctcggaaacggaaggggcggaggaaggattttgtccgatggaatccatgggcgtattaaaatggattaacgaagggctgtcaatgcggaccggctcccgggccgcggttgacagggcgccgcggggggcattatcttggaaaaacggccaaggggccgttcgttcgaggaggagaacatgggaaaccgaaagggagagaggatcggctggatctgcggctggctgggcgcttttctctgggtcgttgtcctcgccgtgatctttttcgttcagggccgagcggccgaggcggccgtcggcctggggatcgcggccctcgccgtcgtccttgtcttcgccctcgctccgtggcggcatccggcccgggcgtattggaaaatcatgatcccgctttacctggtcttgttcgcttcggccgcctgggtcattcgggtttacggcggcttaaggggaatacgccttccggtttggaatctgctgttctttgtcccgatcctgattccgctcggcctcctcggccgaagaaaatggagggacttcgatccggcctcccgatcggatcattgagatcccggcctcattcctgcatcatgatgtgggcgaaaaccttggcgtcgccgaccatgttgtcgatgaggcagtattcattgggctggtgggcggtgtcgtcgattttcgaccagcaggcggcttcgaatccttcccggcggaaataggcggccacagtcccgccgccgattccgatagggcggctttccttctggtagaccgcctggatcgcgcgtttcagcgcttcgaccacggctgatccgggcggcgtggggggggcggctttggccctctgcatggattcggtggtgatcgtcacgccgaactttttctcgatcgaccggcaggccgcctggacgcggccctcgacgtcctcgagccggtaatgggggagaatccggcaatccatataaaaaacgtcctcgcccgggatcgtgttgatgttcgggacattggcgtccttcttagtcggctcgaacgtggagacgggcggcacgaagagcggatttttctcggggaaggcggcgtagagacggtcgagcttgacggccagataggcgccggctttgaaggcgttgatcccccgttcgggggttgagccgtgggtttgccggcccaggatcttgattttcagccagaggacgcttttttctgcgacctcgatttccgttccgtccgggctgcccgcgtcggggacgatgatcaggtcgcccttgcggaaggcatcggaatttttcaggacatgggggatgcccttggagcttcccgtttcctcgtcggcgacaatggccagacccacgttggaggcgggggcgaggccgagatcgtgaaacgccttgacggcgaagatggaggcgaccaggccctgttggttgtcctcgactccgcggccgtagatgcggcccgaggaaacccagggcttgaatggatcgccctgccagagggagatttcgccgggcggaacgacatccaggtgggtcatgatccaaaccgtccgggcggagtttcggccggggtagcgggcgacgatgttgggccggtagccggccggcgcgtcgagatcaggcgcccggatgacttggatatccgtgattcccgactcccggagataggcgatgagaaaatccgccttccgggcttcgccctcgccgccggaggcgggagaaatggccgggatggaggcgagcttgatttggagatcgatcatctcgtcacggaaaaggtcgaggcgggcggcgattttatcgaaagacatccgcgtctcctgttttcttttgagtggattcctttataacactcccctccgccggacgcaagcgaagccgggcgaggcgggcggccaaacgaaaatgtccttagatgggcggcggcggatccggagaaccggatcgcccgggcggccgcaagatccggagcctatcggtttcacggaagacggcggaaggagggccggccttaatgccggccgctcggtggatgaggcgcggcgatcgccggactgaaagccgggggggtgcttttaacggccggcctcaaagtctcggctcatcgcgcccggctccggcccgcctttgattgacacccgcggagggatgtcatacatttacgaaaaatgcgcatcggattcgacgtccgtccctttctccggcaggaaacgggagtgggcgtctacttcaagaatctcctcttcgagctggcggccctcgaccgggacaacgagtactgccttttctcggcgtcctacaaggatcgtttcccgccggccaagatcccgccgtttgagaagctgacgtttgtcgataagcgctggcccgtccgggcggtcaacgcggcttgggacatgttcggccgcccgaggctcgaccggatcttcggcggccggctggatataacgcattcgccgacgccgctgcgtctcccggcgtcgggaaaggcgatcgtcacggtctgcgacttgttctttttggaagagccggagaaggccgaccgggaagcccgaacacggtttctccgcaaaaccggacgttccctccgttcggccgacggcgtcatcacgatctccgagtacagcgcccgggcgatccgcgaacgattcggcctggacgaggaaaaaataatggtgacgctgcttgggctgaaccgcttttttgaggacccggccgccccggaggaaacggccgcggtccggcgccggttcgacctccccggtgagtttctgctgttcgtgggtgcgctggagccgaggaaaaacgtcccggccttaatcgaggccctggccctggttcatgagaggcatggacgcattccgctggtcttggccggccggtccggcggcgacggggaaaacgtcgatcgggcgatcgagcggcgggggctcggcgcgtgggtccgccgaacggggtatctcccggacgtcgatctccgggccctctaccggaccgcggccgcgctcgtttttccttcgtcggccgagggattcggccttcccttgctcgaagccatggcctgcggcctgccggcggccgcctccggcgtgtcggcgcttccggaaatcggcggcgacgcggcgctctactttaatcccgaggatcccgaggagatcgcccggacggtcatccgcctcctggcggacagtccggcgcgcgaatccttgaaaatccgcggcctccgccgggcggagctgttcccctggcgccggaccgctgaagccactctcggattttaccggcggacggcgggaaagacatgatctccgtcctgttcgtttctcattcggccgagctcaacggcgcggagctttggctcttggaaaccctccgccgcttggaccggaggatgttcgtcccggccttgatcatcccccgtcccgggccgctcggtccggcggccgaaaaagcgggcgtttccgtcgacgtcgtgccgatgaagtggtgggtgacggaaaaggcgaaggtctggcgccagcccgcggcccggctcctcaaccggcgggccgtcgcccggatcggccggatcgcccgcgagcggaaagccgggatcatcttttccaattcggccgcgacgttcggcggggccctggccgcccgccgcctgggaattccccatgtttgggcgatccacgaaatcctcgccggcgaccgcgcgtttctccactccttccgcggatcccgggccttgacccggttcattctcgatcgctcggcccgggtgatcgtcaattccgagtcaacccggcgggcgtttcccccctccggcaagatcgcccttgtctacaacggcgtggagatccgttccgccgcgggggagcggcgcggaatcgtccgggccgaattcggcctggaggaaggaagccggacgatcggcgtcgtcgggaagctgtatccgggcaagggtcaaaaggaggtccttctggcgtttgcccgtctcgccggccggtatcccgacctgaagctgattttcatcgggacggcggccgatcgccggtacgaacaagatcttcgccgtctcgtccgcctgaacgatcttgcgcggcgcgtcgtttttgccggctttcgtcccgctctctcggaggtgctccaaaacctgagcgtcgtcgtcgtcgcctcggtcgtcgattcgttcggccgggcggccctggaaggaatggccgcgggcgtgccggttctggcggtcaaggccgggggcctgaccgaaatcatccggcccggccgaaacggcttcctggctgaatcccgggaccccgaagttctggccgcggcgctcgccgagatcctcgatcatcccgaacgttggccggccgtcgttgaaaacggcttccggacggtccgggaggatttctcgatcgaaaaacaggtccaaggggtcacccggatcctgctggaggtctgcgggcggacgattctttgcccgtctccgccggaagccggctcgaacggacctcttttcgcttctttccccggcggggggaagggagacggccgcggatgagcactcccctcgtttccgtcatcctcgtttatttcaacgaccgtctccacttggcttcctgcctggagtcggtcgaggcggccgggcgggacgtcgccctggaggcgatcctcgtggacaacgactcgaccgacgggggtctcgaggacgccgccgctttcccttccgtccggatcatccggaacggggacaatcccggtttcggagcggccaacaaccgcggcgtccgggagtcaaggggggaattcctgctctttttgaacaccgatgcggttcttcagccgggggcagcggcggctctcctggaggccgtgagggcggatgagcggacggccgcggccgggcccctcttgttctccggcggcgggaaggtccaggtttcctttggaggccgggtggatttcgtcggccagctcgtccagaaattcatcaagaatcccctgacggcccgggcgcttcggcgccggccgcgcggggcggaggccggctggctgagcgcggcctgcctgttttgccgacgcggggcgtttgaagcggccggcggctttgacgagagctttttcctctatttcgaggatatcgatctttgcttccgcttccgaaaggccggcggccggctgcgtttcgtccccgaagcgcgggtcttccacgcgggcggggcgacgacgggtcgacgtccccgcgaatcgcgcctggagtaccggaaaagccagatgctcttttatcgaaagcacgcttcgccggcgtccctccgcttgctgcggctttcccttcggattcatctcggccttcagagaatcctcgggcgtttccggggcgaggatgggagggccatgcgggcggcgtaccggaagctgctgaaaccggaaaggggaatcccgtgagacgcctgaaagtcctggaaatgatcgacaagccgtcgctcggcggcggacaggccgttttactggccttggcccggaatctcaatagaaaccgtttcgatgtctccgtttgcgccggaggcggaggtccgctggaagaggaggtccggcgggccgggatgacgttccatccggtggaattcagaaagaatccggcggccggccccgggcggacgctcatccggcttctggcctcccaaggcttcgacctgcttcacacccacggcggcgtggccggcctctacgggcggagagccgcccgccgggccggaactcccgtcgtcgtccacacgattcacggcatccattaccttcattaccgcaatccgctgctccgccgggcggccgtcctcctggagcggatcttgagccggtcgacctcggccgtcgtctgcgtttccgaggccgacctggcccaagcccgacggcaccgtctcgctccggacggccggcttcgtctggtccgcaacggcgtcccctccatcgaggcggcatccgatccggaccgcgtctcgaggggaagagctctttgttcagaactgaaactccgggcgccggtgatcgggacggtcgcccggcttcatcgccagaagggcgtggaatatttcgtcgaggcggcgccggatatcctccgccggcatccggaggcgttttttctcgttgtcggcggcggacctcttgaaagccgcgtccggaaagggatcgagcggctcggcctgaccggccgcttcatcctgtcgggggagcggccggatgccttcgacctgctgtcggcgttcgacatcttcgtccttccctcgctctgggagggcttgcccctggtcctcatcgaggccgccggcttcggaaaacctatcatcgccaccgatatcgacgggtcgcgggaaatcatccgagacggggagaccggcctgcttgttccgccggccgacccggccgccctggccgaggccgtcgtccgcctgctggaggatgaggccttggcccggcgattggcggaacgagcccgaaacgaaatcccggcggcgttcagcctggagcggatggtcgccgagaccgagcgcctctatctggacctggcggccgcgaacgggctataatattcattcccatgaaaaacgcgcgggtcgcccttatccatgactggctcaccgggcgccggggcggggaaaaagtcctcgaggttcttgcggagattttcccggcggcgccgatctacaccctcttccattttcccggaagtcaaatccccgagattgaaaaacgcgtcatccggacgagcttcctccagggaatgcccgctcttcgccggcattaccgctggtatctcccccttttccccctcgccgccgaatcgttcgatctccagggattcgacctggtcgtctccagctctcattgcgcggccaaggggatcattccgaagccggaagccctccatgtgtcttatatccattctcccgtccgctacgcctggaaccagtatgccgcctatttcggtcccggcaagctcggttttccggccaaatacatcgtcccgcccatgatccacggcttgcggaactgggacgtgacgtcggcggcccgggtggaccggttcatcgccaattcccgggcggtcgcctcccggatcgagaaatattatcgccggccggccgaggtcgttcatcctccggtcgacacggaatttttcgtcccgcccgattccgggcccgaacggaagtatttcctggccgtgacggctcttgtcccctacaagcggatcgacctggccgtggccgcctgcaacctgggcaagtttccgttgaaagtcgtcggggacggtccggagatgcgctccctccgggcggcggccgggccgacggtcgagttcctgggatccgtgggcggcgacgatctccgccggctctaccaggaggcgatcgcctatctcctgcccggcgaggaggatttcggcataagcgcggtcgagtcccaggcttgcggaacgccggtgatcgctctggcccgggggggagcgttggaaacggtccggccgggcgagaccggcttgttgttcgaggagccgacccccgccgccttggccgccgttcttgacaaatgccgggggttgaattttaataaggcctccctttgcgctcatgcccggaccttttcccgggacggtttcaaggcgaagatggaaacccgcctggccgccctatggcgggaattcaaggaaccaaggtgatcagccggtaccaggccagactgtcggctcttttcgtggccagtgatgtgctggccatcacggcgaccttcatttattcctatgccttccgttttcattcctatttcatcccggtggatccggccaaggggatcccgacctggcgctcttacttgttcgttctgcccttgttcctggccgttcacttggccgttttttttctccagggtttctacaaaagccgcctccggcggaccaagatcgatgatttcttctccatcacgatcaacgccgtcctgacgctgattgtcgtgatggccgtctccggctatctgaacgcctattccggaggcacggccccgcttttccgggtgaacatcgtcaagctctcccatctctttttggccgtttatttcatcggcgtgatcttcacgatttcgttcttccgcaaccaaatctatttcttcatgaagcggcggttcgcccgcggcctcaacctccgcagcgtcctggtcgtcggagcgggggaaatgggcgtggccgtcgcgcagaagctgttccaatacaaggatctcggcttcgtggtcaagggctttctcgacaaccacaaaccggccgggaaaatcatccaggtcgacgggggaatccccgttctcgggccggtctccgacctcggcaaggtcatcgaagcccaggggatccaggaagtctacgtcgccctcgagctggaaaattacccggaaatgctcgaagccctccaagtcgtcaacaaatatccggtcaaccttcgtctcatccccgacttgttccagctcctcaccctgaaagccaacgtccaggacctggacggcttcccggtcatctcggtcgatgaagtccccctccgcggggcccggcgggtgctgaagcggctgttcgacatcgttgtttccggattggccttgatcgtcctgtctccgctgttcctcatcgtcgcgatcctgatcaagatgacgtcccgggggccggtgttttacagccaggaacggttcggcctggacggcaagcgattcaagatccataagttccggacgatggtccaaaacgccgaaaaggccacgggcccggtcatgtgcgcgcccgatgacgcgcggatcacgaaagtcggacggcttctgcggcggtacagcatcgacgagctgccccagctggtcaacatcctccggggagacatgagcttggtcggcccgcgcccggaacggcccgagttcgtcaaggaattcaccgacagcattccgaaatacatgctccgccacaagatgaaatcaggattgacgggctgggcccaggtccacggcctccggcaggggacgtccatcgagaaacggctcgagcacgacttctattacatgcggaattggtcctttaccctggacctgaagatcatctggatgacctttcggcggggattcatcgacaaatcgatgacttgagaacgatcagctttcctcggcggcgcggcgctcccggagaaggcggaggccgcgttgataatagagaatccacgaggccagggtgaatccggccgtgagggcatagaacacgagcatccacccggcttgttttcccaggtggtttgtcagcaggaccagaaagaccgtccccacttggaaggccgtcgttaatttcccgagaaagaccggcaggacggttttaactcccatgattaaatacgcccagagaacgccgccgacgatcatcagatcgcgggcgaagacgatgatcgtcagccagagggggactcggttgggaccgccgatcccggggagagtcaggagaatataggaagcggcggtgaggagcttgtcgccggccggatccagaattgtgcccaggcggctcctctggtggagatgacgggcgatgaatccgtcgaaaaggtcggaaatcgcggcgatgaagaaaatgaccaggggctcgatggttttccgctcgaggaaagtccagatgaacagcggaaccaggaggatccggaaggcgctgagaaggttggggacggtcagggccgaggaaacccagtcttccgcttccgggcgatccgtccggctcatttcccgggttctttcgccaggccggccagcaggtccaagattcggatcgcctccgcgccgggcacaggttggtcgggccggaacgtgcgatcggagaagatatccataagttggaatgaaacggccgcaatgatcgccggggcgtagggatggtcggcggggacgtcggctagattgatccgctcgggcgggatttggacgacgatcgtccggccttttttccgcaggtattcgaccaggtggacgaccgtttcggccatctcggcccggttcatcgtttttttcggctggaacgtgtgattggaatagatctccatgatcccggaggcggcgaccttgacgatgaacgtccgggcccaggaggtcgaaatgtcgacaagaacgggcggccgaacggctactccgatccagatgtcattgaattttgccccgatcagggcggccacatcctccttggtcacggcctccaggccggggatttcccggtattcgtcggggagatcgacgactcccagccgggttttcagggcttccaggcgttcggcgaccgttttatcggaaggatcgagcgcctgaagcttctggaaggcgtccaggctccgggaaaattggttcatctggtagagcgtctcggcgtattcgcggagaacggttcggtccaggggattgttctcggcggccaggccgaggtgaaacaaagcccgcgggtagtctttttcccgggtgaacagacgggccagggaaacgtgagcgatctgaagcttcggggcgtattcgaggaccttgaggaaggcctccttggccgcggccgtctttcccgtgcgggcggccgcgtcggcctcgaggatcaggctttcgacgatcgccgtccgcagctcgtcggcctctctccgggcgaaggcgttctccggatcccgtttcagcacttcgaggtaggatcgcagggcgtcctcccggcggccccatcgccggtagacctgtcccaaaccgagctgggacgtgacggcgtccggagagaccgtaagggagccgacaaaatcggcctcggccgcggtcaggtcgttgcggaggagggcgatataacccatcgccgtccagtagaacggatggctttccccgaggcggagaaccgctttttcggccttgtccgcccgctccagccggaggagattccagaccttgtcgacggcgatccggtcgtccagagagagagccgcggagatctcggccggcggattttccaggtaaatggtcggctcggcgggcgggcttatggtcgcgcaagcggcggcggcgaggacggccgccagtgttccagccgttttctttaccacgtcggttctcctgagacgatataggccgctagatcaatgaggcgagacggctcggccatgacccgggcctcgagatgaccggccccttcccgtcgcttcagaatcagcgagcgtttttcgagtgaagcccaaatatcctcccggtcatgagggacgcggatataaaatacccggaggccttcgaaaagtaaagcgcggatgcggcttttcagggccggaaggccttcccccgtcaccgcggatagatagacgctttcggtttcgatctcgttgcgggcgagaaaagcgcggcggtcggggagacggtcgattttattgtagatccggatcgtcggaatgccccgggccccgatttcggccaaggttttctccacggaggcggcctgcgcctcggcgttcggcgcggaaagatcgatcacgtgaaggatcaggccggcttcgaggacttcctcgagggttgccttgaacgaagagaggagggccggggggagacgcttgacgaaaccgaccgtgtcgctgatgaagtagggcaggccgtcggggagcgcggtccggcggacaaggggatccaaggtggcgaacaattggggcgaggtgaacgccgattctcccgccaggcggttgaacagcgtcgttttcccgacgctcgtgtatccgacgagggcggccgtccggatcaagctttccttccggcttcggcgctggccggcccggcggccggcgaccgaacggacttcgcggcggatccgggcgatccgggcttcgatccggcggcgatcggtttccagcttcgtttcgcccggcccgcgggttccgatgccgccgcccaagcgcgagagagcttttccttttcccgtcaggcggggaagaagataggtcaactgcgccagctcgacctggagcttgccctccgttgtccgggctctccgggcgaagatgtccaggatcagctgggtccggtcgatcacccgagcttccagggcttgttccaggcttcgctgctgggagggcttcatatcctggtcgaagaggaccaggtcggcgcccgtttcccggaggattcccttgatctcttcgacttttcccccgccgatgaaagtccgggggtcgggcgaagcccgggtttgaaaaaccttccgggcgatccgggcgcccgccgcccgggccaggtcttccaactcggccatcgattcgatcgcctccgaacggtctctggacgaggtcatcagatggacgagaacggtcctgttcatcgccgctccgcccgtcccggcgccggcaaaaccgacgcgggatcggtttcatccggttggatccagcggacgccgggcattttccgaaaccaggtcatctgccgcttggcgtaatggcgggtgtcgattttggtgagggcggccgcttcgtccgggccgatttccccccgaaggaggcggaggacgtgcttgtagccgagggctttgaacggcgcggccgattccggaacgccgccggccagaagtcggcgcgtttcctcgatcaaaccgcggtcgaacatccggtcaacccgctcctcgatcctccggtagagatcggcccggggacggtccaagccgattttaacggggcgttcgtccccgagaagtccttcggtccgtttgaagtgctcggagatcggccgcccggtgagggtgaagacttccagcgcccggacgatgcggatccggtcgcgccggccggtctttgccgcgtaggccggatcgacgacggccaggcgctcccagaggacttccggcccgcgctcgccggcttcggcgtccagggctgatcggacggcctcgtcccgtcccggacccgggaaaagaccgtcctcgagggctttgaaatacaggcccgtcccgccgacgacgagggggatccgttcccgttcgcggacggccgcgatcgcctccgaggcaagggcggcgaaatcggcggcgtggaattgcgtcccagcgtcggccacgtcgatgaggtgatggggcacgcgggccctgtcctcggccgagggcttgtccgtgccgatatcgaatccgcggtagacctgcatggaatcgcagctgatgatctcgcccccgcgctcttccgccaggcggagggcgaaggcgcttttcccggaccccgtcgggccgaggatgaagacgagggttcgttcaaaggatgacaaagcggatgatgaagacggccgtccatacggtcgtcaggagaagaagggcgaagacctgccggcggctcaagcgcatccaattttctccagattccggacgagcgcggtttcctggcccggccccagggttttccggaccgccaacacctcggctgtcaggatttcgtcatagcctcggacgatggtccggaacacgtcctcgggcaaatgctcgacgctcaagcgaagggcggcgtccacttccacctttccgtcgaactgaagggccattttttggaaaagcggccccagggaagggcggatctcgtcgagcgcccggtttaaaacggtgacggcgaccgggccgatttccttggaaacgaatttgaaaatgaaggcgcatttttcattgagggcttcaaggattcgaccttgttccgccccgggcgagacggccggagttttcttagccgccgagggttcggccggagccagaatgcccaggcaaaggaaggcgaataggattttccggctttcccgggccccgagctcgctccgctcctggaacctgcggagggagggagcgccgctgaggatctggagggcgtagcgctcgggcggctcgaatttcaggagggggaggaaaaacggggcggaaacgcggaccggctcttcctcgctcggcaggcggcgggcgatcatcgcgtcgttgtgcatctgtcggatcccctcgagaatcaggtcgggggtctggagccggccgagacggtggccgcccgcgagcacggactcgggatcgaaagaatactccccgtcttcccggtcgaagagggtgaacatccggcgggcgaaaaaggattcggccaggctccaaagggggatcgggccgagaagtcccaactcgcccaaagccttgagaacggtgagattctgacccgaagccgtccgttcgacgcgggccgcttgttcggtcgacagaacttttttccggaccaaggcggctaaaaaatccttgggatcagatccggattgggcgacgagaaggtgtcccttgtcgaaaaagacgattcgttcccccttttcgctccggacggtcagacgcccggttcgttcctgtctccagagatcgtgcaaaaggcggggaaacgggatatccgccagcgttccttccagcgggcgttctttcgacatgcctttaatttatcgtccggcggcggggctgtcaacgcagtccaaagagggaagggaaacgccgattcatcgcgtttccccggttttgctccgccgggcgcggaaataaggtgaattagcctgtgtctccctatcgggctcagcccaacatggaccggctgaggaggccgagggcgatattcaccgcggctttggccgcccagaaggcgtaggaaagaatcattccttttttcaaggggattttgaacgccgcggcgagaccgaatcccagcacgccgaacatccacagctggaagaagtcgacctggccgaggagaaggtaggtcaaagacgtgatttcagcgccgggggctagaagggccaggctggtcgatgtttgaatcaccgatttccggatgaggatcaggacggctcggacgagattgccgagcagcccgtcgatcagcttggcgtggagaagaacggagaaaacgggaaggaaggcgccctccgacgaaaacatccggccgaaaatgaggagaaacagggcttggatcgcgaggaacacgccggcgaaggccggcgagacgacgagcgagcgaaaggccagcccgcccggcttcggattttccatccgggccatcatctcgtcgaaccgctccttgcccatccgttcttggatcttgacattgtccttcagggccgcggccgagtccttggcgctgtacggcgccgccacataagagaaaacggccgtcagggcaaggatgagaatcaggatcgcggcgatcggtttgggccgggcggccgcgtcggccatcgtccgggccggttcgaaaaaaacgccttgaatccgctgggcgaacgtcatatcaggctcctttccgctcctcgcgctcaattccgccgtcacgaagatggatgatccggccggcttgttcggccacgcttcggtcatgggtgacgaggacgatcgtgtgcccttcgccgtgaagcttgtggaagattttcaggatttcgccgccggtccgggaatcaagattgccggtcggctcatcggctaaaatcagggccggttcgttgacgagagcccgggcgatcgcgaccctctggcgctctccgcctgaaagctcgggggggcggtggtccatccggtcgagcatctcgacctcggccaaggcggcccggaccttcgtttcccgttcttttttctttgttcctttgtagatcaggggcagttcgacattatggaacgccgtggcccgcggaagaagattgaacacctggaaaacgaacccgatgtcccggttgcggacttgggccagctcgttttcggtcatggccgaggccaactggccgttcaatgtgtaggagccgctcgtcggcgtgtcgaggcagccgatcagattcataagagtcgattttccggagccggaaggccccatgatggccacgatctcccccttttggatctcgaaggacacgccccggagcgccttgacttgggtcttgcccaggtcataagtcttggagagattctcgaccttgatcaccaggggaggggaagcgctcatctttcggttttttccttccgaacgtccgtcttgatcaagtccccgtccttgagggtgcggagcgcgtcgtacggtccggagatgatcgtctggctttcggtcaggccggaagcgatttcgacctccagctcgcccatgattcctttctggacggggacgaaccgggcccgtccgtgctcgaccacgaacacgccttcctccgtcttttcccgggattttggagacgtcccgccggcgggctcgggcttgtcccggacgacgagggccgagatcggcacggccagcacgccctctttccgggaggtgatgatgtcggcgccggccgataagccgggcttgaggccgggggagggattctccagggtcacgactactttgaagtctttggattcctgggtggtcgacgaagccagcccggatttctgcagcgccgaggagccgatctcggtcacttttcccttgaagacctcgttggggaaggcgtcgacccggacttcagcgtcttggcccaggacgaccgcgacgacatcggtttcgtccacttccacttcgacctccatgaccgaaagatcggcgatggtcatgaggaccgtcccgggattgttcatcgtccctatgatggcgacttcgccctcctccacccggaggctcgtgatgatgccgtcgatcggggcggtaaagaccgtcttggagagattgtccagggagcttttcagggaggcctgggcttgggcgatctgaaaatcgatggctttcagcgaggcctcggagatttcccattgaaccttggcctgttccagctgctctttggagatcagctcgttgtcgtaaaggtttttttggcgttcatagaagctccggttcttggccagctgggcctcgaccttgatccgctcggcctgggagctctggatgaaggcccgatcgtggtcggcgttggcttcatactgggagggatccagtccgaggagaaagtcgccgcgcttgacctcctgcccttcctgaactccgatcttgatgattcggccggggatttgggccgacaggttgatgttctttttcggcttgatttcccccgacgcggagatgagggatgtcaggtcccggcggccggctttttcggttgtcgcccggatggatttttcccttcgggtggagagattgaggaggatgacgaagccgatgagggccgcggccgcgatgatcaagacggcttttttcttttttgtcatggattgagccttgtccgaataaaatcaccctttcatacgatggagcggctcgaaagttcagaaaataagcgcggcgggatcgatttccgccgccgtcacggaggccgctccgccggccggcgggaaaaggggaaacgggttgaaagacgcgtctccctggtctatgatagccggacatgaccggttacacgtcctacctggatgccgcccgggatgccgcccgcgaggcgggggacatcctcaggcgcgattaccgccgggccggccccgtgtccttcaagggggagatcgatctcgtcacggaaaccgacaccgcctcccaggccttgatccatgagcggctggcggcccgctttcccggccatgatttcctcggagaggaagggctccgaaagatcaccggagccggcttccgctggatcatcgatccgctcgacgggaccacgaatttcgcccaccggttcccttggttctgcgtctccatcgccctggagcacgacggggcgctcgtcgccggaatcgtcttcaacccgatcatgggcgagatgttcacggccgaggccggcggaggggctttcctcaacggcgagcccatccgggtctcggcgaccggggagctcggccgaagcctggtggcgaccggattcccttacgacgtccgtgagtcacggaccaacatggccgcccataaccgttttctcctggccgcccaggccgtccggcgatgcggatcggccgccttggacctctgctacgtcgcgtgcgggcggtttgagggattctgggaattaaagctcaacccgtgggacacggccgccggggcggtgatcctggccgaagccggcgggcggctcaccgatttgcggggccgcccggcggacatctacatccccgagctctgcgccagcaacgggctcatccatcaagcgatgctcgacattctccgggaaacatgatgcgcgccttggccctcgccttcgccctgatccgcctggccggcgggtttcccgggggatcgacgggggataaagcctctctccggccgggcgatttcgtcctggtgaagacgctgacggcggcgggagcgtccggctggacggataccggcctcgaggtccgggccggggaggaattctggtttgaggcgtccggcacgatctgcctgcagaccggcaacgaggaagcctattgcggtcctgaaggcatccaggtgcggacgatgcagcagccgctgccggaaagcaacctcggttgtcttgtcggccgggtcctacgggaagtcgtgatcgtcgaggatccgaaaacgaaggaaaaaacggtccgggaatacggcgtggctttccccatcgggaaagccggcccggccgtgatcccggccgacggccgcctcttcctcggtcccaatgagaacgtgaccggcgacaacgacggcgcctttgccgtccgtgtctaccgccggggctgaacgatcaatcgccgttcttgcgggccaggaatttttccagaaactgcgtgtcgtacgttccgttgatgaaatccgaattggccaggatcatcaagtggagggggatgttcgtcttgatcccgacgatcgtcgtcatttccaaggcggtctgcatcttcttgatggccaggagccgcgacggcgcgtaagcgatgatcttggccacgagcgagtcgtaatagggcggaatgacccatccgccgtaggcccccgaatccacccggatgccttcccctccggggaggacgaggaaatcaatcgtccccggcgacggggcgaacgtgttcggatcctcggcgttgacccggcattcgatgcagtgacccttcatcttgagctcgaaggggaaattgaccttttcccccgcggccgtccggatctgggtcttgaccaggttgatcccgtagaccatttccgtgatcggatgctcgacttggacccgggtgttggtctccatgaaatagaatttccggctctcgtcgaccaggaactcaaaggtccccaagttttcgtatccgagatacttggccgcgtcctcgaccgccttcatcattttccggcggagcttctcgtcgatgaagggcgaaggcgtttcctcgatgactttctgatacttccgctgaacggagcattcccgctcgccgaaggcgacgacgttgcctttcttgtcgccgatgacctggatctcgatgtggtgggctccgacgatgtacttctcgagatacagggacggatccccgaaagcgtttttggcctcgttctgagcgatgggaaactgctcttcgaggtggttggcgttgcggcagatccgcatgcccttcccgccccctccggccgaggccttgataatgacgggatagccgattttttgggcggtttttttcgcctcgtcggaatcctcgaggaccttgtcgcttcccggaatgaccggaaccttggcccgcatcatctcctggcgggcccgattcttgtcgcccataagacggatgatcgaggccgggggaccgatgaaggtgatcccctcggtctcgcagatctcggcaaaccgggcgttttcggccaggaatccgtacccggggtggatggcgtcggccttggtgatttgggcgacgctgaggatgttgggaatattgagatagctgtcctggggcttggccggcccgatgcagaatttctcgtcggccagcatggtgtggagcgacgtccggtccgcctcggaaaaaacggccacggttttgatgcccagctccttggccgcgcggatgatgcggagggcgatttccccgcggttggcgataaggattttcgaaaacatcgcgccttacgcctgcgggacgatcaggaacagcttctgaccgaattcgacgggcttgccgttctcgacatagatttccttgatgacgccgtcggcatcggattcgatctcgttcatgagcttcatcgcttcaacgatgcacagggtttgtttctttttgacgacgtctccgacctcgacaaacggcggggaactgggggaaggcgcccggtagaacgtcccgaccatgggggaaagaacggcatgggcgtctcccttgatttcggcgggaggttccggaacggggccggcgaaaggaatggagttgggagcggcgggagcgaggtcgacgtacgaggggcgattattgacaacgaccgggacattccggccgaccttgatcttgaagccttcgatttccagctcgaattcggacagatttttttcctcgagaagtttgatgattttattgatttcttcaaaatctattttcggagccatatcctcctcctgaaaaaaataagtccatcttctttattttcttacggttaaaattatcccgaaatattctggaaaaaatcctcattacgttaccctacgaaccggggactgtcaagcaatgtgaatcgacaagatatatcgctttattgttttttctcgaagaccgaggccctccggccggcgcaccagacatccttgacctggaacttgtaatcgagcaggacgatatcggcatcggccccggggagaagcgttcccttgcgcttctccaagcccaaaatccgggcgggattggaggtcgccagaggaagaacatcctgaagcgaccagccgctccattccataagtttcaggagcgcctcgaggagacggaggttgctgccgaaaagcccccccgcggccgtcaaaagaggcgcttccttcgttcccgcgttccggctggcatcggtgacgaaaacgactttatccgccggcttcgcctggagaaccaggaaaaccgccgccgggtgaagatgacgtccgtcggcgataagctccacggaagcccgctcgttcaggagcagagctccggccagccccggctcccggtggaagaagccgcgcatggcgttgaagaggtgcgtcccgtggctgatcccggcgtcgaagccgcggatcgcttcctcgaacgaagcgtcggaatgcccggccgaggcgatgatcccccggcggacaagaaacttgatgaacgcgggggcgccgggaagctcgggggccagggtcatgagacgaatgggcgtgcgaaaaatccggaggtactcccggatttccgcctcgtcgattcttcggacggctccgggaggctgggccccgtgccgcttcttggaaataaacggtccctccaagtggatccccaggatgtccgggccggcttccgtcgtcgccggcagggaaccccgtttcccccgcggccgaagggcgtcgaccgcggccagggcttttttcaaggccgggcgggaggccgtcatcatcgtcggcaggaccgacgtcgtcccgccccggacgtgggtctcgaggaccgtccgcgcggcctcgaccgtcccgtcaatgtagtcggcgccgccgccgccgtgctggtggatgtcgatgagtcccggaacggcgatgagatcgggggcctcgacgacgtccatcgtgaaccggtccgattgatcgtgggccttgcggacggccgcggcgatttccttgtcccggccgacggcgacgatccggcggcccttgatcaggacggcgccccggcggatttccttgtcgggcgtcaggacgacgccggcccggattaaaatatagggaaccggggggcggccccttttcacggctttcgttttcattttacgggcaggtttggttgtttgcggcatcagatttttctccaagcggcggcgatttccccgcgcagcgcggccagggcccggcgggcccggatttccgttttcgcctcggccagcacccggatgaccggctcggtgttcgagggacggaggtggatccaatgatccgggaaatcgactttcaatccatcgagcagattgaccgttcccttgtcttcgtatcgttttctcaacacccgaatcaggcgatgggcgcgctcggccgatccctcgatccgatccttgaggagcacatagcggggcagggctccggccagggccgaaaccggcttgtggccggccgccagggcgtccagaacatggcccatcgccgcgaagctgtctcggcacggatggatttccggatcgatgactcctccattcccctcgccgccgatcacggcccgcggccgggcagcgaggaccttttcgacgacgttgacctcgccgatccgggtccggaagatcttcactccgtgccgggcggccaggtcgtccaaggcccgggtcgaggacatgttgcagacgatcgagcctttcgttttttccaggacgcggctcgccgcccagacgagggtcatctcctcgcccagcgggcggccgcgctcgtcgatgatcgccagccggtcggcgtcggcgtcctggacaaagccgatgtcggcccgggccgttttcaccgcccggcagacgccggcgatgttttcgggagtcggctcggaaggatggacgaattccccggtggggtcgcacgccagcggaacgacgtcgcagcccagctcccgaagaaaacgcggtcccaggacggctcccgcgccgttgttgcagtccaggacgacgcggatccggcggcggcggatcgcttccccgtcgaaccggttgaggagccggcggagatgggcgtcggcggcgcggggcaagacctcaatggtcctgaatttcccggcggcgacgaaatcgaaggcgccctggtgatagatgtcgaggtattcctccgtctgctgaggcgtgaggtacagtccgcggcggctgatgaacttgaggccgttccattcccggggattgtggctggcggtcacggcgattcctccggccgcccggacctctttcgtcaagtacaggaaagaagggatcgggaggatgccgacgtccaccggccggcagcccacggccaggagaccggacacaacggcttcggccagcatgatcccggaggagcgggcgtcgcggccgacgagcaccggcccgccgccgacgtaggttccgaacgcctgggccagggccgccgccagctggggcgtgagactgtcgccgatgattccccgcgctccggagatgctgattttcagagtcgtcgcgcttttcatgggatcatccgctccagggaccggaggatctcgtcgactttctccctggcccgctcccgggaccggtcctcggcgacgacgcgaagcatcggctcggtgccggacgcccgcacttggacccagccttgcttgtcttccacccggatgccgtcccccgtgtcgacgtcgcggccgcggaacatccgggcgatttcgctgatgacgccgtggatgcgggacgccggacagtagaccttctccttgacgatgtgataccgggggaggcggtcgacgagggccgacagccgttggccggtcttggccatcgtttccaggacgaggcccatcgttaagaaggcgtcgaaggccggctggaaggcgggaacggcgacaccgccgctaccctcgccggcaaggatcccgtcctcctgggccaaggccaggaaaattggagcgggccccacccgggtccggatcagcgggcatcggcgggcccgggcgacgtcctcgatcatccgggaggtggaattattggtcacgaccggaccggagcaccgggccaggacggaatcggcgaccaggggaaacgtgtattcctcggaaagggcttcggctgtttcgctgaccagggagacgcgcccggcgtcgctgttgagaagaaagcccgcctcagccccggccgcccggacgaccgaggcgcactgagcggcgttccgcggccgcggctccggatcgtgggggaagaatccgttaggctcgtcgttgagcgggatcaagtcgaaccccagcgtgtcggcgaaccggactagaaacggcgcgccggctccggcgcaggcgtcgatgaccacccggaagcgggccgcccggacggcggccgcttcgatgaaagcgccgagctccttgaaatagaaatcggccgtctcggccgtcgggaccggaatgagccggccgagatggtccacggccgctcgctcgaatctgccgagatggtaataatcgaggacttcctccccttgaaagggattgagaggggagccgtccgggccgatgaaagccaaggcattccaggaaacgtcattgtggccggccgtgatggagacgcccccgccggccttgcgcctccggactgctttttgcagcaggggggtaggacagacgccgaggtccagaacgtcgcatccggaggagagaagggcggaaacgcaggccgctcggagcatggggctgtgaatccgcgtgtctcggccgacgacgaccggcttgcggtcgatgaaagccccgaaggccgaggcaaaatccatgaccatcgtcggcggcatggacgggccgacgactccgcgaaccccggagaggccgattttcagcatgagctccctaattataacaaaagaaaagggccgccgcacgaattaggagcggattttcgacattttccccctgaaaacgccttcctttgcttttgcccgcctcttcccctatcatgagaatcccatgtttgatcagttgtccggccgtcttcaaaaggcgatgaaatacctccgcggggaggcgaaggtgactgagggcaatatgtccgaggccctcaggcagatccggcttgcttttctggaagccgacgtcaattacaaagtcgtcaaggatttcgaagcccggattaaggtccgggccctggatcagaccgtcctggacagcctgactccggcccagcaagtcatcaagatcgtccgggacgagctcgcctccgtcctgggaacaacggacaagcccctgacgttcgcctccgcaccgccctcgatcttcatgctcgtcggcctccagggaagcggcaagacgacgacctgcggcaagctggccaaatgggcggccggcaagggccgcagtcccctcctcgtttcgttcgacctcaagcgagccgcggcccaggaccagctccggaccatctccggccagctccatctgccgttttacgagatgacggccgcggccatggccaagccccggtcggccctggccgaccttcttcaatatacccgcaaccgcggatacgatgtcttgcttgtcgacacggccggacggcttcacgtcgacgacgaattgatggacgagctgcggatcgtcaaggacgtcctttcgcccgttgaaacgatctatgtcggggacgccatgaccgggcaggacgcggttaagagcgccaagaccttcgccgaccggatcggcctgacctcgatcattttgaccaagctggacggagacgcccggggcggggcggctctttcgatcgtcgcggtcacgggaattcccatcaagttcatcggcgtcggcgagaaattcgacaagctcgaggtcttccatcccgaccggatggcttcccgtatcctgggcatgggggatatcctgagcttgatcgaaaaggccgagcaagaaaccgacctcaaggaagccgaagccctggccaagcgtctccggcggcaggagttcaccttcgatgattttcggtcccaactccgtcagttgaggaaaatgggttccctcgagggggtgctcggccacctgccccaggccgggccgttcaagaacctggccggggcccggatggacgaggcccggctgcggcatttcgaagccatcatcgattcgatgacggccgcggagcggaccgatccgaggatgatcaacggcagccgccgggctcgcatcgcccggggcagcggccggccggtgagtgaagtgaaccagcttctccgccagttccaagagatgcgctcgatgatgaaaaaatccatcttccagaagatgatgtcgtcgttgaaatgaacgggcggccggtttccggtcccgcccgggagcgctgatcgcaaggaggaattccatgtatgtcgtcggcgtgacgatttggatcaaaccgggattcgaggaaaagttcatcgaagccgtccggatgaatcacgaaaagacgcggcgggaacccggaaacctgcgcttcgacgtcctccggcatgaggacgagcccggccgtttttttctctatgaggtctaccggagccgggacgatttcgccgcccatcagcaaaccgcccattacctggcttggaaggaaaccgtggccgactggatgtcccggccgcgggaagggatcaagcacttgagtctctttcccgaggatcgacccgccgcctggtgagatcccgccatggtttttgaatggaccgcccccgcccggatcgtcttcggccgaggcgcggcggccgatatcggacgccgggccgcggagatcggcaggcgggttctgtttatccggactggagcccttccggcgacaggcgggacggtcgaggccgcgcgaagcgcgctggcggccgaagggctggagtttctcgaagccgaggtcaggggggagccggaggtcgaagccgtcgacgccttgaccgcccgggttcggccgttcgaaccggaggtcatcctcggcttggggggcggcagcgcgatcgatacggccaaagccgtggccgggttgttggcaggcggcggggaagtcctcgattatctcgaggtgatcggccgaggccggccgttcagccgccccggcgttccggtgatcgccgtgccgacgacggcgggcacgggggccgaggccacgcgcaacgccgtcctggccagccgggcgttgggggtcaaggccagcttgcgggggccggccctcgttccccgcttggccttggtggatcccgccttgaccgatacccttcccccggccgtgacggcttccacggggcttgatgccctggcccaatgcctcgaatccttcctggccctgaacgcccggccgtggacggacgccctggcccttgaaggcttgaaccgggccgctcggtcgctcgttcccgccttccgagacgggagcgtcctcgaagcccgcgacgacatggctgtggcggccctcttgagcgggatctgcctggccaacgcgggcctaggagccgttcatggactggccgcggccctgggcggaaaatttcccatcccccatggagtcgcctgcgggcgggttcttccaggcgtgctctcggaaaacatccgggccatgatcgccgggggcgcgggccggacggttccggccaaatgcctccggctggcggaggtcttcctccccgcgagacggggatccgaaaaaacacggatggccgccctcggcgaccggctttccgccttcgtcgaggagcttgaacttcctcgcctttcagccttcggcgtgaccgaggccgacctgcccgtcctggccgaagccgcggggcgctccagctccatccggcaaaatccggtcgcccttgacgaaaaaacgctgatcggcatcctgcgggccgccctgtgatctccggacttgccgcgccgggaatgtcgcgctgtttcggcgctggttttcgggtcgacgggaaaagaataaaaggagcggatcggttggttgactttcaagcgggttttggctattatctacaaaccattttaaaagaacggattacacaattatgttgtcactgcgtcttatgagatttggagccaagggccagcccgcttaccgggtcgtcgtcatcgactcgaaaaagccccgggaaagcaaggcgaaggcgatcatcggatcctataatcccctgaccgatcccgccgaaataaaaatcgacctcgccaaagcaaaatactggatggaccggggagctaaaccctcggaaaccgtcaaatcgctcctggccaaaccgcagaaagcgactcccaagacctgatcgccggggcgattttcccgaaggaggagaacgtgaaggaactcgttgaattgatcgcccaggctcttgtcgaccagccggacaaagtcgtcgtttcgcagatcgagggcgaacaaaccacgattctggagctcaaggtcgctcccgaggatttgggcaaggtcatcggcaagcagggccgcacggcgcgggccatccgcatcatcctcggagccgccgggatgaagctgaagcaccgctacaacctggaaatcatcgaaaaataataccgtgaaacgcctgggccggattctccgaacccagggccgccggggggaagtgaaggcggtcctggacgccgctccccgcccgggtggtttttttttagaatctttgtcagggaaaacgatgaattccgcgaatacgcggtcgaatccctgacgccttataaagacgcccatacgctgaagctccggggcgtcgactcgattcccgacgctttgcccctggccggccgggaaatcttcgcccttcatgaggacgtcgcccctccggccgaggatgaattcgccgttgaagacttggccgcgtgccgggtcgtgacgaaagaaggccgtcccgtcggccttgtccggggagtctgggacacgggtggaacaccgttgctcgtcctggatccggacggcggggggaatgagatttacatcccgcttagccggagcatctgcccggtcatcgacatcgaagccaagcggatcgtcatcgatcctcctgacggccttttggacttaaatgagatttgatataatcacgatcttccccgagatgttcccgagcgtctttgcggggggcgtcatcggcaaggccgtccaaaggggacggttggacctgcgggtgcataaccttcgcgatttcacgacggacaagcaccagcaggtggatgaccgcccgttcggcggcgaagaaggcatggtcttcaagcccgagccggtcttcgccgcggtcgaagcggtccggggttcggaggatccgcccgtttatctcctctcgcccgcgggccggaggttcgacgaccggctggccagggaaatcgccctccaacctcgggtcgttctgatttgcggccgctacgagggcgtggacgagcgggtcgccctccatttggccacggacgagatctcgatcggcgattatgtggtcacgggaggggaattgccggccatgatcatcgtcgacgccgtcgcccggcacattccgggcgtcgtggggaaggaaggctcggtccgcaaggaatcgttcgccgagggcttgctggactatcctcagtatacccgcccccgggattttcgggggatgaaggcgccggaggtgctgttctccggcgaccatgataaaatcgaagcctggcggcgccgcaaggcgctggagaagacgcggcggagaaggcccgaccttttcgcccggctgtcgctctcgcccgaggaccgcatgttgctcgacgaaatcgacaacgaaaggaacgaacaatgagcctggtacaagtgacggaagacaaggtgatgaaaaaagatctcccgcctttcgctatcggcgacacggtcaaggtccacgtcctcatcaaggaaggcgaaaaggaacgcgtccaaattttccagggcgacgtgatcgccaagaaaggccgcgggatgagcgagacgttcaccgtccggaaggtctctttcggcatcggggtggaacggatttttccgcggcagtcgccctggatcaagaaagtcgaggtcgtccgcagcggacgggtccggcgggcgaagctttattacctccgcggactgaaaggcaaagcggccaagctccgcgaagaacgctgatccgcgccttgcccgatttcgagattgaacgccggcatctcgaagcggggaggacgctgatcgccggcgtggatgaagccggccgcggggctttgtgcggtcccgttgtggccgcggccgtcatccttccgttctcttggtttgccggcctgccgcccgattgggtcgaacggctggatgattccaagcgcctttcccccacgcgacgcgagcggctcgcccggcggatccgccaagaggcctccgtcggtctcggcctggccggaaacgccgagatcgatgtcttgaacattctccgggcgtctcaggaggcgatgcgccgggccgtggccgcgctgcccgttccgcccgacatggtcctggtggacggcctcgcgatccgggatttcccccggcctcaggacgccgtcgtcggcggggaccggcggagtttctcgatcgccgcggcttccatcgtggccaaggtttcccgggaccggatcatgatccgggcggcccgccgttttcccggctacgggatggagcggcacaagggctacggcacgcgcgctcattttgaagccttggctctccgcggtccgaccccttttcaccggatgtcgtttaatctacaataccaaccgaagctcttctgaatccatgactattaaagcttccgaccgcgccaaaatctccgaacgggcgggccaatttgtcaaggcgggacgaatcgaggaagcggtcgccgaatatcaaaagctcctggacggatccggccaggatgtctcgatcggaaatatcatcggagacttgtgcctccagctgggacaggaagaccgggccatcgagcttttcatgaataacgtcgaaacgctggaacggcggggggcgtattcgcaggccctggccatcgccaagaaggtcaacaagatccggccggcggaaccggacgtcatgatccggctcggggatctctacgggcagctcggattttcgggcgaggcccgggaacaatatactcaagcggcggatgagtatgaaaagcggaatgagaccaagccgctgatcgccctctacgaaaagagggcccggctcgaccggaccgatctggtgacccggctgaagctcgcccgcctctatctggaggagcggaaaggggatcaggcccaggtcgttttgaacgaggcggccgatctgcttttcgtccgcaaggaatacggcgaggccgaaaaaatcctcctcgaggcgctggccgtcgccgacggcgattaccggacgttgacgaacctcgttcgcgtttaccgcgagctcaagcggcccgagacatccatggaaatgctgggccggatcgtcaagaagcgagggccccggaccgaccttctcagcctgatggctctcctgcacagcgagcagggagacaaggacaaggcggccgaaatctacggccggatcctggccgaggatcccgggaactacgacatccgggcgaaactcggaatcattgagatcgagcgcggccggccggatgaggccctggagatctttgatccgcttatatcccattttctccagaaaagcgacgaggataaagccgccggcctgctcgggctcattctgatgtccggccggatgcatcttccgacgctcgagcggctggccggcgtcttccgcggcgtcggccggacgaaggacctggaagtcgtgcttcgggtccttctggcggaataccgttccgagagtcgggacaatgaccggatccggattctccgcgagctctatatcctccttccgatggatgccgggatcgccgaagaagcggagactctagggatccggcgcgagctccatcaggaggccgccgaggtggcgcccggggccggccggccgatttcggaacaggaccaggaaatgctccggctgaatttggccaaggccgagctttacctggaacaaggcctcgtccggaacgcccggcggatcctggagaacctgcggcttctctaccccgacgatccgcgcatccagaagaaaatcgaaagtcttcgggccgccccgagcgttatcatcgacaagaaaatccctgagatcgtcgaggaaacggcccgccgggagatcgacatcatcggccctgcggttgaaccgggaatggttgtccctccggtttcggctccgcccctcgacctcgaattgctcatttccgatttcgcccagcccttgcctcccgaaaccccgattcatccggccgccgaaacaccgtcgagccggaaaaagggaccggttttttccgttcggagcggtccggccgcctcccggacgaaacccgcgcctcctccgccgctccccgcgcctcaggccgaggcgcccgacgaagaggccggatccaaggtcacgtccgccgaaatattcgccggcttggatatcggcccgttcgtcgcttcggcagccggttccgccgccgcgtcccaagggtatatcgacatcaccgacaagatcgaggaggaaatcgaggctctcgaagtcgagttctacaagcagcttaaggagcggacctcggtcatcgagaaggacctggtcgatatcgtccaggaattccgccggcaggtggatatcaaggtggatcagcgcaattatgaatcccgctacaatctgggcttggcctttttcgagcagaacctctatgaggaagccatcgccgagttcgaattggcggccgccgatccgggccggacggcggattgctggagtctgatcggacaatgctgcgtcaaaaaaagaaactatccggaagcccgccgtcgtttcgagggggcgatttccttgacgccggaggaatctccggagcggttcgccttggcgtacgaactggcctcgttttacgagatgatcagcgaaaacgaggcggccctggctctttaccgcgagatttcggcctggaatccgaagttccgcaacacggccaagcgcatcaagatcctcgaaaaaatcgtgtcctgaccgcttcctctttcactgtgcgcatcatcgatttaagccatctcctcgccgaaacgatgccggtctttcccggcgacgcggccccgcggatcacggaagcctcgaccatcgatgaacacggattcgcctcgaaaaccctccgcctggggactcacaccggaacgcacgtggatgcgccggcccattttctggccggcggcgcggccctcgaccggctgccggccgcccgcttcgccgggcccggctgtctcgtggacgtctcccgccttgccgggccgcggatcgagatcgccgacctggagggggaccgggaccggatcgcggcctcggaattcgttcttctcttctccgactgggcgaagcgctgggggagtcccgcgtatttctccggccatccggcgctttcggagaaggccgcccgctggctggccggcttcaagctgaagggagtcggggtggacgcgccttccgccgacgtcatggatgcggcccgtccggccgtgcaccggatttttctgtcccggggtatcgtgatcatcgaaaacctgaccggtctccggacgctccgcggccgggcgttcctcttcgcctgcctgcccctgaacatcgccggcggggacggctcgcccgttcgggcggtggcgatcctctgatcccggccttcaggatacacggttcgagcgaacggttcgcgcggggacctcttcgccggggagcaaacacgatccttcggcacgcccgacgggctgtcctcctcatgaagacgatgttgaggacaagagatagacaggaatccgaaaagatcttatgaatgccgccggccgaaaaagggatgggaaaaagagaaagcttctcccggtcaattcattttatccagcgggacgtccaggacgggtttgtcctcgaagccgcggaaatcgaaatgccaccattccggggcgtagggaatgaatccccggtttgtcatggctagttcgagaagggcgcggtgggcgatggcttcccgcggcaggtccatgaagtcgcgggccgcccgctcggtgaaatcatcgaacggcgtcggcatgaggacctcgcggccggcggcgtcgacgagggtgagatcgacggcgtagccgcggttgtggcgcgatcccttggccggatcggccacgaaccgctcgtcggggagaatcgaccagaagattttttggaccgaaaggggacggtagccgtcgaaaaccttgaggccgtagccgaaggttcgcagatccgcttgaacttggaccagggcttgagcggcttccttgacgaggaagcaacgggcgatgggatagacggccttgccggtgaagttgtcggtcgtcgcgtacttgatgtccaggatgatgtccggggcggcgacggcaagctcgaccagctccggcggggcggccgcgaagtccggggcggcgccggggcggcacccgagggaaaggaaagctccggccaggagtactacgacggcggcggcggcgaggggtcgcggcccgcgatcggcatccgaggcggcgcgcctcccgggatgaatcggaatcatcctgccgcgatcgaggctggttgtgctcatgaaaacgctccttcggatttttccctagagaatcatttttgttcccggaaatcaaggttcaaatgaaagaatcctctctcccgggccgatccccaaagggaaaaggcgccggaggaaccccggtcggcgggattccctccggcgccttttcgccgggccggggcttatttaaccgctttcccgtaaaggatcaggatcagtccccggtcggcgtccgtcttggaaacgccgacgacggtcttttccccggccttcaggagaagggtcgtgcggatgagctcgttgaagcgcgaggccgccggcggggcctcctcttttttcaccaggccgaccgtcaccgccgggttccattcctgcctgcccaggcggatctcggtctggatggtttcgaccgttccgtccttcgtgtatttcggtctcagccagacttcgtattcccccttgggtccgattttcgcttgagccgtctcgccgtcgatcacccggatgaccgtcccgtcgaggaggacgaagcttttatatttcaggatgccgcgaagctcccggatgaccgcatcgttcttcagggtatcttcgcccgcgtccgatccctggacgatctggactgtgtactggatctcggccggcttgatgtcgatgtcccgaacgatggatatcattttctcgacgatctccggcgtgtcggtgacgacgatcgatttctccgcgcgcccggccggcatgacgcggccgagggcgctttggtaccctcgaaggagaatcgtgatcgtttcgagatcggcgtatttcagcttgatgagctcggtccgaagggccggggcgggcggcgcggcggcctggggcgccgcttcaggcggctcggcgggggaggccggcatggaagcggacgcggccgccgggttttggctctgggcccggacggcggcggcgaaaacgaacgtgagcccggcgagaagaaagattccaacggattttttcatgtcattcctccaggttgagagagtcattgataaaccagacgatctgaagaccggtctcttccgatatccacgtgaacgacgggacgtctcccgccggcgggggcgctgcggacgaaggaaagggggacgggcggccggcggaaaagacggttcccccggccggggcccgggagtccgtttccgccggaatggtcccgggcgcgttcggcttgatgatccgaggccgcgcggcggaggccgcggcccgggagggatggttttccaccttggggatgagccagggaatatgccggacgccgaaaaatatggcggcgccgacaagaaggacgcccagaacgcagccgagggaggggcggaagaaccgggcgaaacggtccgatttcgccgtctttccgccggcgacggccgcccggatcgcgaccctccattccgcctcggtgaaatccgcgtcgtcgaaaacggccggatgcttcaaggcctcgatcccggcccgaaaggcggacgcctcggttcggcaggaggcgcattcccggaggtgctgttccaagcgctttttcgatccggcggagaaaatccgtccggtcggatcggaaagccgtctgcgggcggaccggcaattcatcgggaggtctcctgaagcgaaggatcgagggcggccaatcgatcgcggattttaccccgggcccgggagagatggacgcggacggcgatcgccgagctccggacgatcgcggccgtttcccggacgctttttccctccaggtcgcggaggatgaatacgtcccgctcccgggcgctcaaggcggacagggccgagaggactcgttcccggatttcttgccggccgcgggcttcctcgggccccggtccgccgccgccggcgttctccagaaggaaatcggagttcgcccaagccgtttcccggcgtcgccggccggctcgctcgcgtccgacgttgaccaggatctggagcagccagttccggaagccgcgttcgaaatcgcattttccgagatggcggaaggcccggaggagcgtttcctgggcgacctccaaggcatcttcgcggttgccggtcatcttataggccagtccgaacagcgtcttccggtagggaagaacgagcggctcgaacgccgtggaatctccggcgagcacccgggcggccaattcgatctccttcacgtccatttcacaaccgagtatatcgccggaggtccggaaaggttaagggcggacactccctcgatttccccccctggctggattctcctttcctctcaataagaaacggaggcgcggatcgaaggaggatttataaaatcggggcggcggcccaaattcagcggcggtcggccggcgtcacttgaccgctttcatcgccgccagggcccgggcggccatccggtcctgaaaatcggccttctcggccggctcgggccgggttttcaggaacgcctcggtttccctcaggatggcctcctccgcctccagcagcttcggcaggaagcccgtgccgtcggcgttgtcgagccgggagaccagcagatattcgtttttatcgtactcgtcgatgggatggatgagggtcttgatccgggcggattcctcccaaagaggcgcgttctctcccttccaaaggggctccgggctccggccggcctcgacccaaagaggaacggccacggccgtgaggggttcacccgggatgacccacatcgtcgccgaggattccggatcttccggatttttcccgacgatcaccacggccgctgatgtgtcggggcggttgatggtgtggcgggcgtgaatccataagccgggctcggccgggatatttttccactcttcgggatcgggattccgcagcagcgcgtggccgcagtcccggctgaagcgcgtcaggatcgtttgaaaatcgatcggccggccgggcggcagggaggcgaacaaccggccggcccggtcgaatcgaaggtagccggcccccgccccggcccggccgctgcgggcgaagttggtgaccaccaggtatttttccggggccgcggacgcctcgaacttctcaaagccgtggttgtgaacctcgaagaggcaggctcggccgcttccgtcgatgaccccgaagttggcccgggcgccgaggtcgggaccgagattggcccggaggagccgctcgaattcctcgaccgtggcgcacgtgcggagggcgtcggccatgatgacgccctcgaggtcctggagctccccggatttttggggcaggttataagccacggtgttcatgacggcgaaaccggcggagttgaggccggcccaggcttggcggcccgaggcgccctcggcattgatcagggccgcgtagctgtagggcgtctcccggacgaagacgaccttgttggacaggacggcggtgtcgcggtttttccacagcaccgctccgccggcggcggaagccgccgggctgatcacggcggccgtgcattgctcggcccggttctccccgaagacggccggggcggccagtaaaaaagatcctgcgatcaagagccgaagtccacggtcaaagcgcatgttgttttccttaattgaaggggggaccaggcgccggtttgggggagacgctcgttctcccgccccggcccgctccctccctcgaggcatggtatcctcgggcgcaaacggtgtcaagaaacggaggcctggttttccgatgaacaggaaaagcagcccgtcgcatcgaagaggacgcttcggccccgccgcggcaaagggaccgtgacggctcggccgccggagcggcgcctccatgacgagaagcgcggagaatgattcggcttaaatgcggcgcccgatttgtcaaagagcctccagcggcttgacaggggagggaggcggacgttataagggttttatcccgccgatgaggagcgcttatgaatacggaatccctgttgatcgccaaaggaaccgaggagatccgccttctgccccgcatggccaaccgtcatgggctgatcaccggggcgacgggcacgggcaagaccgtttcgttgcaggtgctggcggaaaacttcagccggatcggcgtgccggtcttcatggccgacgtcaagggcgacctcagcggcgtcagccggccggggacggaaacgcctaagatcggcgagcggctggacaagctcggcctgcggccgtttgaattcgcggggaagccggttgtcttctgggacatcttcggcgaccagggccacccggtccggaccacgatcagcgacatgggcccgcttcttctcagccggctcttcaacctgagcgagactcagagcggcgtcctgtctcttgttttcaaggtcgccgatgacaacggccttctcctcctcgattccaaggatctccgggcgatgctccagtactgcggcgaccacgccgatgactttcagaccgagtacggccggatctcgccggcttcgatcggggcgatccagcggtcccttctcgaccttgagacgcagggcggcgaccggctgttcggcgaaccggccctcaacctcgccgatttcatccaaaccgattcccaggggcggggcgtgatcaacatcctggcggccgaccgtctcatgctccagccgaaaacctacgccacgttcctcctgtggatgctggccgagctttatgaaaacatgcccgaggtcggcgacctggagaagccgaagctggtctttttcttcgacgaagcccacctcctgttcaccgacgcccctgccgtcctcctccagaaaatcgagcagatcgtccgtctgatccgctcgaagggagtcggcgtttatttcgtcacccagaatcccttggacgtgcccgacatcgccctcggccagcttggaaaccggatccagcacgccctccgggcgttcactccccgcgatcagaaggcggtccgagccgcggccacgacctttcgggccaatcccaagctggatgtggagaaaaccatcaccgaactgggggtcggcgaagcgttagtctcgttcctggacgagaaaggccggcccggcattgttgagcgggcgttcatcctgcctccccggagccagatcgggccgatttcggcggacgaaaggcgccggatcatcggaagctcggtgttgtacggccattacgaacggcagatcgaccgggagtcggcttacgagcatctgaaggaaaaagcccgccaagcggaggaggcggccgcccgctcccccattccgaccggttatccccaaggaccctcctatgagccgccccgggccccgcgtccggtcggccggccgagggacacctttgttgaatccgtcggcaagagcgtggcccggtccctggccacctcggccggccgccagatcatccggggcctcctcggctcaatcttgggcggccagcgccggtaaccgccggccggcggtctctgttccgcgttatttacgaccagcgcggtgagaaaaaaccgcggtccgctccgttatttgaatgtcaacggaacggatcatgagcgaagtcaacgacggcggaaacgggggagccgggcgggacatcgtcctcctcgggcggagcgcgtctttcgcccgcgttcgcgagctgatcgaccggctgaaagacctggacactccggtgttcatctcgggggaaagcggcacggggaaggaagtcatcgcccaagcgatccatttccgcggcgcccgggccggcggccgattcgtcgccgtcaacggcggcgcgatccccgacaatctcctcgaaagcgagctcttcggctatgccaagggcgcctttaccggcgcgctccgggacaagcccggcttgatcgaggaagccggagggggaacgttctttctcgatgaggtcggcgacttgggattcccgctccaggcgaaactgctccgggttcttcaggagcgcgagatccggcggatcggggagacgcggacccggccggtcgatgtccggttcatcagcgcgaccaacaaggatttggagcgggaagtgagcagcggccggttccgcgaggacctttactaccgtctccggatcgtaaccatcgacgtcccgccgctccgcgagcggcccgacgacctggagctgctcctccaccattttatcgcccggtacggcgaaaagatcggccggcctcgggtttatttcactccccgggtcatggaaacgctgctggcgtacgcgtggcccggcaatgtccgggagctccagaacgaagttcagcgctgcctgatcctgtgcggcaacgaggggatcgtgcgggtcgaacacctgtcgccgcgtctcaatcccggccggtcgccgggcccggcccccgaaagcttcaacttctttgaggccaaggccgattttgtccggcggtttctcggccaggctctccgccggcatgaaaacaacaaggcccggacggccgaggaaatcggcctctcccgtcaggctctctttaagctactaaaaaagcaccggattacggcgcccggcgccgccgaggggaactcccccggggcggattgaaggggaaggggggttctgataaagtgaaagaatgagcccgaacgaggaacggaacggagaccaggcgttcgagatcgcctgtccgcattgcggaacggtgatttgggtggacgggagaaaccggagcatcctgaagaccgagcgggccgcccggaaaaaagaatccctggacgaccttctcgcccgggagaagaccaagaaggacggcctggccacaaaattcgaggccaccgcctccctccagaaacaaaagaaagaccgggccaaggacgcgttcgcgaaagcgttcgccgcggccggcgaggagccgccggctgaggattagccggcggtcaggcctcgtcccgcgggccgccgtcttcccgggtcatggtgaacccggtcaagccgaagaccgcaagaatgaagagggcggcgtaattcccgatcgcccagggcaggtaatcgagcaccgggacgccgagggctccggcgacatacacgccggccatgctccaggggacgagagggacgatgatccccccgcattcgtcgatgatccgggaaaggttcttgggcgccagccgcaatttccggaaagcgggcccgagcagctctccgggcaggatgaccgccagataagagctgcccgtcactaaggctgtgacgacgcaggatccgatcgtcaccaggacgatgctccccgccttgcgggccccggccatgactttatccaagaccacgccgagcatgccggttttctgcatgatcccgccgaagcagaaggcggtgatggccaccaactgcgtctccatcatgctcatcaagccgccccggctgaggaggcggtccacttccggaactccggtggcggccggataccccgtgttcagagacgcggcgaggtcggctaagggcgctttctggaagacggcggccagaaggacggcgatcagcgaggataagagcatgccggggatggtcggcttcttggcgaaggccagggcgaagacgatgaccagcggcaggagcagccagacgttgaatgtgaaatgggtccggagcgtgccggtgattttcgtcaggacctccgaggagacggcctgcgcttgggagcggaatccgaaaaaaaagaatacgccgaggctgagcaaccagccgggaaccgccgaccacatcatgtgcttgatgtgatcgaacaggtcggcgccggcggtcacggcggccaggttggggatgtctgaaaagggagacatcttgtcgccgaagtacgccccgcagacgacggccccggccgccgggccgaggggaaggccgaggcccatggcgatccccatgaaggcgacgccgaccgtgccgatcgtcccccagctcgtccccgtcgccacggccgtgaggctgcagacgaaacaggccgtgacgagaaagaatttcggggagatcagcttgaggccgtaatagacgaccatcgggatcgtcccggcggccatccaagcgccgatcataactccgacggccagcatgatgaggatcgccggcatggccttggcgatcccctcgacgatccccttctccatctccttccaggagtagcccaagccccagccgaggagaccggtcaaggccgcggccgcgacgagcaggacctgcggcttgatttgatacacgccgtagccgatgccgagcagaacggccatgagaatcaagggaaggagggagaggaacaaggagggctttttcaccggcgccggagaggtcatgaggggaaattatcacgccgcccgggcatttacaagaacccccggccggatttagaatggcggcggatccgccatgccgtcccctgaagaagagcttcgcctcctccttcccgtgatcgaccggctgacgaaagccgccttgtttcccaagcgcctggcttgccgcggcgccgcccgcatcccggagacggggcccgtcctcctggtcagcaatcactgcggagcgatcaaggatccagccgcggtctttcggatcgtctcccgtcccttgtttttcaacgccaaccggatgctcttcgaccgcggggagctggacttcctgatccgcaagcacctccgccgccacctgaagaattacggcctggttcttgaccggctgctggggccgctcaagacggttttcgtccgcttcgtctcgacgaacatcgcccgcgtcgggacgatcccggccgacatgtacgaggggagcaacctgacggccgtctctcttttcatggattaccttcgggccggccgggcggtcgtctcgatgcagggccggggccgcgtccacccggacgacccgaatccctacgtccggaggttcggccgggggatcccgtacatcgccttccggatgaaagccggggagggattggatatccccgtcgtccccctgtcgattttcggcacgcagcgggcctgggggattccgggaacgatccgggtgaacgtcggcctgcccctctatatccgggatttcctcggcggggacataaacgagacggtggaacggttccgggccgcgcttcaagaagccgtcgagcggttgctcgtcgaatccttgcgaaatcctttttcatccggatgattcaaatcgtgaataatccggattaatcagttcaggggcaagatccgttcggccgggaagggaacgccctccaggggctgtccgcttcctgacagatggggccggctcaccactcgatgagggcgccggcccagctgagtccgccgccgaaggcgatgaggagaaccaggtcgcccgtttggaaacggtcccaagcgtcgtgaagggccaagccgaccgaggccgacgacgtgttgccgtatttcccgatgaccgagatgaattccgccggcccgggaactcctttggccgcggcgtcgaggatgcgctggttggcttggtgggggatgacgtagcggacgtccttgatgtcgaccccggccttgcgggggacgcgctcgcagaggtcctgcatgatccggacggcgaatttcatcacggtcgatccgttctgccggaaccagaagtttttcgtccgtccggccaaaaggtctttggcgccgccgatctggacttcgtcgacgagggaggggatggagccgagctcggtggccaggaggcggtgcatcggccgttccttggtcacgacgaccgcggccgctccgtcgccgaagagaatgcagccggctcggtcggtgtaatcggtcgccgtggtcatctgctcggcggccgtgaccaagccccaggcgagatctcgggtttgaaggaggctctcggcgatgcccaacccgtagatcatcccgctgcaggcggcgttgaggtcgaaggccagggcccgctcggttccgaggtcgtgggcgatttcgtaggactgggccgggcagaaccggtcggagatgaccgtcgagctgatgatgaaaccggcgtcctttccctgaaggccggcccgctcgagggcggttttcgccgcggccactacatgcggccggagcttttcgtcggggccgagaacgcggcgctccttgatccccgtcctcgagacgatccactcgtcggtggtctcgaccatcttttccaaatcggcgttggtcaggatttttttggggacgctcgttccgatgctgcggattccgatttcggtcatgatcgttcctttcggcatttactcgccgtcctttaaaagatggagatgggcggccgtctcccggttcagcccgtggacgacgaagcgtccccgggcgacgatgttctcccccgagcgggcgaccgcctcgatgaagacccggcggccgatcttcttctcgacccgggccttggcgatcaggcgcgcgccggcccggaccggacggaggaaatcgacgcgggcttcgccggtcaaggcgattggagcctcggccacggccgcggccagggagttgaggagggcgaaaaggacgtggccgcggacgatgtcgcatttctccaggcacatccaggactcggtttccagaagggacaggccgcttttccccggatcgatctcgatcatttcgccgacgtggtcgcgggcgcccagcgaccgggagacgccgaagtagcggccggccatttcccgggtccggcgccggacgtcggggatggacagggtcgaacggtcgaggcggatggtcggaacgctggccccgagggcggcggccagctcctcgtccgtgacaaacggattccgctcgatctcctcgcggagacgctcatgcctctcctctttgcggatcatggaattctgccgtcgtttatgaccaggtgataataaagaagaacaagccggacgtcaagaggaaattatcggcttaagtccggaagcggttcttgatgtgcgcgacggtcaacggcaggatgacgtcctggtatttgccccgcttgaaggtgtcgcggatgagatcggccacgccccagataaagctgacgatttcgctgtgattcaagagagattctcccccggtttatgtaattccggcgtcaggtccgggagagaggatagcccggccccggacgggaagtcaaacgagatagcggccgtcccgggcgatccagcggcccttggcgtaaatcgaggccttttcgatcaaggcgtcgtagtggtggcggctcttgttgatcccgatcccgtaggaatcgccgacggcgaaatggaccgtgccgaaggctttctcggcctcgagcatattggggcagatgcgggccccggcgttggtcccgacgccgaattccccgatgatccggccggtcggatcttcgccgatgttcttcagaaccgcctcgatgcccctcccggaagaggagacaagcttcccgcgctcgaaatgcatcaccccgcggccgagcttgtcgtcgatcaggctgatgaccgccttgcccgtaaacgtctcctcgaccgggcaggtgtagcattcgccggccgggagatttccgtggcggccgcgcttggaaatgtcgccgatgtcgatgtgccagccgcgctttttgacgctgaaggagatgtcggttccggccgggttggtgatccggacgtctccggcgtccttgagaagccgcatgatcctcttggttttttcggccagcttgaaatagtcgatgttgaccagccgctccatcatgtcgaccgtgatcccgggcatcatgcacagccggccgtgggtctcgccggcttgaaccatgtagccccgaaacggcttttcggcgatccgggcgtcgagcatgtagaccatgaccttcggactttcggccagcatccgaaaaagcttcgtcggttcggaaatcggccggagggtttccgtcatcagataggtcgtcgtctccgctccgcacttcttggcccagaaggcgaaagcctcggcgatgtccatcttggccttgtccgtgaccaggaggaactgttctccggccttgatccggagggattgggtgacggctttctcggccgcagcgtagagcttgtttttcacgggattcatcggggcctccttcaacaggcctctactttagccgacggactcgcgggttgtcaaagacgcgggaatcgtcgtccccggcggccgccctcgggacggttgttgtccggggaaagggcttatgttccgccggccccgttggagaccgcctgtcggagaatcccggcaagcctgctcttggcttcgttgaaaaccgtccgccgggcgcccggtgattcatcccccgccgcgttttgtctttgccgccggcttgactcgggaatcgtccaggtcagacgcggccgagaaggctcatgcggggcgggctagcgccggtaacggatgacgaagccgatgatccagcgttcgccgacggcccggctccggtagcggcgagcggcggcgccgcgcggataccggtcggccacgatgatcagcgcgtcgccgcccatccgagcggtcttttcccggagaatgagtttgacttcataacggtccatccaaggttcgggcctgaaccaaaccttgcccaaccggacatgatcacggcggggctcgcgccggagaagctggacataggcgtagtcattggacgcaaacctcggtgtgccgggataacggcggtgcccgtaggaacggaaacaggctgccgtcgtcatggccgtcgcggccaggatcaggaaggccgtcatcgtcttcgtcttcatctcgcttctccttggccggcgtttttcgagccgttccaaaaagagaatcggcaagaatcgtaccaaaaagacgaaaattcagactcgaatttctaaacgcatgaatatccgttaaatacgcgcgtccccggaatcccgcgctttttttcggcccgctccgttttccgttcgtccggctttttgttgtccaccgcggaggacaaacgaaggacatgggagacaggggtggaattcagagcagagaaaacggcacccggcgggattcgcgggtatcggcgcgaaatccgaatccgtccccgattccaggccaggattactgcttggcggattcgtaccgggagaggacgtcctgggtgagctggaggaacttgtcgtacttgatctgaatgcccttttcctgtttaagcttggccaggtaggcctggaggaacatgttctttttctggttcaggatctgggccgtttgggtttccttcacgttttcgaattcctcccgggtcaccgtcttccggtcgcgcacgcgaaggacggccgtccccgtctcgaaatcgaacggcgcgctggcctcgttcaggggaagggtgaaggccaggtcgtcggccgtcttgctttcgccgacgatggcgatatactggtcgcgcttgtgggcctcgacggtcttgaactcgaatccgttcctggccgcgatatcctcccagtttttctcctcgagacgacgtccgagagcggccaggcgggcccgggacgtttccattttgcgctcgttgaccagggccgtttcgacgtccgccttgacttcctcgaacgccgccggccggggagcctcaaccttccgcagctcgaccagaccgacgccggtgtaggtgtagaccggggccgaaacttctttctccttgagcccgaagagggccgtgccgacggcgccggacggatcgttgtcgctccaagcctcgccgtttttcaacagcccggtggattcccctttcaggccggctttccggagggccgtctcgaggctccgggccgacttggcctccttctcgatcttggcgatccgggtgtcggcgagctgacgggctttttcgtccagaaggatggaccggatctgggccgaggctccggccagcggggtcgtcgtcgcggccgttttttccgtcacccggatgacggcgaggccgtccgcctcggcgatcaggtccgaggtctggccggatgtcagccggtgaatctcatcccgttcgggctggggaagcgactgccaatcatagaaaccataatcgcctccgccggacgccttggcgtccttggacagctcccgggccagggccgcgaaatcgccccccgcgccgagacgttcgagaacgcgccggccctcggcttcgacaagggctttgtctttcccctcgaacggcagccaaatccggccgacccggacggattccgggttggtgaaccgggacaaattggcttggtaatagttctcgatgtccttttcggacagctcgatttcctttttcagatcctcggctttcaagaagacggccaggccttcccttttctccgggatgagataagcgcccttgcgggcctcgaagaaagcctggacctcggccgccgacggcgcctcgtcgagggagaccttggacgtctccaggatcagcagatcgatgccggccgagtcggaggccttttggtaatcggaccagacctcgtcgggagtgacggccagcccggccgtcagcagccggatcatcttgtccaggacgatgtcctggcggaggctgtgttcaaactcgctgaggttgatgtggttgtactggagaaccctcttgtacatttcgtagccgacgaatttgccgttctgctggaggccgggaatagacgtgatccggtcgcggagctcctcgtcgctcgcccgcagccgcatcgcccgggcctgttccacgagaagagtctgctcgacgagttgctccaggacctgctggggaaggttgagctgctcgatgaatgcccggtcgatttcctggtattgcgacttgatggcttcgatccggttgcgaagagcctggagataatcatcgccgctgatttttttccggccgatgacggccagggtgttcccggcgtcgtcgccggtgagttttccggacgcgccccagatgaagaagatcgagacgacaaaggcggcgacaacaagccagagaacccacttcagggacttgacgttttcacgcatggatttgagcatcggttcacctcggggacgcgggggtcatgattttgagggagtgttccgccgttcccggcggaaaagaggggccagccgggcgtacgtcgtctcgagatcctcgaggacgatcttcgtccgcccgcagatgggcatgaaattcgagtcgccggtccagcgcggaacgacgtgcatgtgaaaatgatcgatgacgccggcgccggccgcccggcccaggttcaggccgatgttgaacccctgcgggcggtagtgcttttttaggacgcgcaggcagctccggagaagctcgtccatttccccggtgacctcgcgggaggcgcgctcgagcgaggccgagtggcggtacggggcgatcatgagatggccgggcaggtacggaaatttgttcatcaggacgaacgcccgccggccgcggtcgaggacgaaggcggacgcgtcgtcccgggtccgggccgcccggcagaaaacgcagcccgtttcttttttggacgtgctccggatgtaaggctcccgccagggagcggcgatatattccatgttacttgttgatcagttccttgagcagcttgctcggcttgaaatagaggactttcttgggcggaaccttgaccgggtcgcccgtcctcgggttgcggccggagcggggcgggcggttccggaaccgaaaggagccgaagccccggacctcgatctcctccccggccagcagggcttccttgatcgtctcgaagaacatattgacgccggtctccgcttcctgcttggggatgttcagctccttggaaatcttgttgatgaggtcggccttaatcattgggtttctcctccgtttcggcgcctgatttcttggcgttctgcagctggcggagctggtccttgatcaggtcgccgaaggtcaaccggtcatcctgggtttcttgatacttctggtattcctgcctctgcaggtcgctctgggcctggcggaagctgagggagatcttcttatcccggggattcagcttgatgattttcgccgttttctgatcgccgaccgagacgacctcggccgggttctcgacctttttctcgtcgatctcggaattaaagacaacgccctcgatcccggggagaatctcggcgaacacgccgaattcggcgatccggacgattttgacgttgagcaggtcgccgactttctgccggaggaagaattcctcccagatgtcgccctcgagctgcttgatgccgagggagactttctgcttctcgacgtcgatgttcaggaggacgacctcggcctcgtcgcccactttcagcttggccgaggggtgcttgatcttttcccaggagatgtcggtgatatggatcaggccctcgatgccgggttcgacttccagaaacgctccgaaatcagtgatggacgtgatccgccccttgatccgggttcccgggacgagacgctttttcaactcttccagcggatggggctgggtttgtttcaggccgagggagacgcgccgggaggtcggattgacgtccaggatggacaccgtgaccttgtcgccgagattcaggagcttttttggatgaatcattttccgagaccaggtcaggtcggaaatgtggacgagtccttcgatgccgggttccagctcgacgaacgccccgaagtcggtcagggacgagacttttccctcgatccggtcgccgggtttgtacttgtcggtgatgttgtcccaaggattaggggtgagctgcttggtccccagggagatcttttcgtccttctcgttgaaatcgaggacgagaacctcgacttcctggccgatcttgaacaggtcgtgcgggttggcgatctttccccaggtcatgtccgagacgtgaagcaggccttccactccgccgatatcgacgaacgctccgaaactcgtcagggagcggaccagtccttttagcttctggcctttctggatttggctgaagacgatctttttcttcttgtcccgctcttccatcaggtaggcccggtgggagacgacggcgttttccgtcttgcggtcgtatttgatcactttgaccttgagggtttggccgacgatcttagccgggtccttgagcggccggagctcggcatgggaatcgggcatgaaagccttgagaccgacatggacggtatagccgttcttgatcctgtcgatgacccggccgctgatggaggcgccttcttcgtaggccttttccagaagctccagggcccggcgggcgtcggcctggcgcttggacaggatgaagtatccttccttggaatcggtccgctccagcacggcctcgatttcgtcgcccacggagggaatccgggcgtcggcgctttccgtgaagtcttcgatcgggatgagtccctcgcttttcaggccgatgtcgaccaggatgtgggcgggcaggactttaacgactcgcccggcgacgatttttcccgggctgacttcctgggagctgaattggtacttgtccagcaggttctcgtaatcctcggccgagattttttcgttgttctgctttgcatcttcggtcatggggtctccttgatgggtagggcgccggcggatccgcccgccggcaaaaccgtggcttgtccgctcccggttttcccggatatggaatttgctcccgcgagcataaaagacggatatgatttcctaaccatgttaatcaaaagggtgaaaaagatggttaagtctaaacgattcaacccggtttgtcaatcgctaagtcaagataaggattgaacttagatgaagtccctcccgtcccgggaaaagcgggccgaggcgccgcggctcgtccttgacgctcctgtccgtccggcgggagaggcggggctttctttcgtctccgcctcggcgcgatcgcccgcatgaatccatgaaaattgtcggccggatcgtctctccctttcccgcgggcgacggcggtcggacggatacagccggggaaaggccaaatcgggacggccggcccggatgaaaaacctcaggcgttgccttcctcgaggattttcttcagctccgtctcccggggaagctcctcgagggaattcaagccgaaatacgtcaggaatttctccgtcgtccggtagagcagcggccgtcccggcgcgtccttgcggccggagatcttgatgagcttgttctcgagcaaggtgtgaagggcatgggtcgaatcgacgccgcggatgttcatgatgtcggtctgggtcacgggttgatgataagcgacggccgagagggcttccagggcggccgacgacagccgcttgcggcgctcgatctgaagaagcttccggacgtggagatcatacgccggtttggtcatgaacacccagccgccgcccgtctgcaccaagcggatgggacggggggcgtcctccatttccgtcccgagccggagaagggcctggaggatctcttcctcgggcgttccatcaagcacttccttgatcttgtccatcgtcaacggctcgaccgagatgaaaatcaaggcttcgagaatgttcttcaaatcgtccatcaggcgtcctcgccggccggctctttccgaagccagaccttaatcgtgtgaaacagctgctcctggacggccacgacccggcgggccttgatcagctccaggaggcagaaaaaggcgaccagggcctcctcgagggtctcctgggcgtccaggtattcaagaaaatcgagaaagccgtgctcccgcagggcgctcacgatttcccggattttgtccgcgaccgaaatttccttggtcttgaggatccgctgcggcacggcttgtttccgcttcatcatggcgaaaaacgattcagccaggtcgaacagcgagacctcgatcaagtcgagatcctcctcgggcagcggaacgttgagggccgtccgccgccagatcgtcgactgctcctcctccttgtcccggaggacggcggaaacgaccttgacccgctcgtaatcctcggttcggtcgggccgctccttccgagggtcgatgtccggctcgacgggctgctcccggggaaggaggatttgcgatttgatgtagatcaagagggcggccatcaagagaaattcggcttcccggtcgaggttgatccgttctcggccgtggaggtaatcgaggtattcccgggtgatcacggccagggggatatcctcgatcccgatcttcttctttttaataaggaagagaagaaggtcgagcggtccctcgaaaatatcgagcttgatctggtagccgtccccgcccccctcgacggcggattcctcttcgggggccggcttctcgagcgggccttcctcgttgggatatccggggtcgaccatgcgtccgggcctcgagcctaaaatcccagggcgtcccggacttcggccatcgtggcttgagcgacgcggcgggcccggctgttgccggcttcgaaaatctcccagattctctccgggttcttttctaaggcgcggcggcgctcccaaaccggttcgaggaaacggaacaaatgctccaggaggacggccttgcagtcgcggcagccgatcccggccgtccggcagccgcgggcgatgtcctcccgcgcctccttggggacgaaggccttgtggagggtgaaaacggggcagtcgtcgggctcgccgggatcggttcggcggacccgccgggtatcggtgaccatcgggaggatcttcgcccggatcgtctcggccgaatccttcaggtagatggcgttgccgtaggatttgctcatcttccgtccgtcggttccggccagccgcggcacttccgtcagcatcgtccggggttcgggaaaaatcgggccgtagaggcggttaaaacggcggacgatctcccgggtcagttcgacatgggcggcctggtcctcgcccacggggacgagatcggccttgtagaggatgatgtcggcggcctgaaggacgggataaccgagaaaaccatacgtgttcagctctttttcctggagctctttcagctgttccttgaaggtgggaacccgttcgagccagggcagaggagtgatcatcgataagagaagatgaagctcggcgtgttccttgacctcggactggagaaacatgacgcatttttccgggtcgaggccgacgctgagccagtcgacggcaacctcgtaggaccagccccggatcgccttggcgttggcgtattcagagctcagggcgtgccaggggacgatagcgtagaagcaccggtagaggtcctggaaggcaatccaattgcggagggcgccgacgtagttgccgaggtgcagcggcccggtcgggcggacgccgctgaggacgattttgcggggatcgggggtgggattcatccgagcacaatcacaatcatgagcttcaccggccacatcaggatgtccaggaaacccatataaatcaggaagaggacgatgatgaaaccgaagggccggatccgatcgtagcggaacgcggcctggtccgaaagaagccccatcaacacgccggatccgtccagcggcggaaccgggatgaggttgaaaagggcgaaataagaattgatgagcacggtcatgatcagaatgagggccaggccctccagcggatagaatcctcgagagaggacgggcaggaggaagcccatctgccggaagaatccgttgatcaaggcctggataaaccgcccgacgccgggaatcgtcagcttcatcaggaacaggaggatgagcgagacgagggcgacggagatgttggccgccggtccggcgaaggagacccagaggttgtcccggcggggattgcggaaattgcggggattcaccatcacgggtttggcccagccgaacgccggcaggcgggccagcgagagaagaagcggcaggaggatcgttccgaacggatcgatgtgggcgatgggattcaaggtcacccgccccatgttgtaggcggtcgggtcccccatcttcttggccgtccagccgtgggccgcctcgtgcaccgtgatggcgaagaggaggacaaaaatctggataactatcgaaatgacattcatttgcgtcggcggtatttatagcatattcgttcttgaaaaaccagaacgattgttccataatgcccctcacagaaggagcgccgtggccgaatttctcgagtttaaaaacgtctccaagcggtttggagccatccaggccgtcgacggcgtgtccttggaaatcaagcggggcgagtttttcgcccttctcggcccgagcggctgcggcaaaacgacgatgctccgcatcgccgccgggttcgagacgcccgacgccggccaagtctttctcgccggccgggagatcaccgatcttcccccgaaccggcgcccggtcaacacgatcttccaaagctatgccttgttcccccacttgaccgtccgggacaacatcgccttcggtctccagatcgccaagaagccgaaggccgagatcgaccgcgaagtcgagacgatgctccgcctcatccggttggaggaccaggccggcaagaagccggatctcctgtccggcggccagcgccagcgggtggccgtcgcccgggccctcatcaacaagcccggcgtcctcctcttggacgagccgctggccgccctcgacctcaagctccgccagaggatgctcatcgagctcgacatgatccacgaccaggtcgggatcacgtttttatacgtcacccacgaccagagcgaggccatgagcctgagcgaccggatcgcggtcatgaacgccggccggatcgagcagatcggcgccccggctgagatctacgaggcgccgcggacaagcttcgtcgccgccttcatcggcgacacgaacttcctggagggcgtcgtcgccgatcatccggaaccggagtacagccgcctccggatcgagggacttcccgacgtgaccgtttacaacgacaaacagatcgccgacggacataagattttcctgagcatccggccggaaaagatccagatttcgcgcgaccggcccgagccgaagccgaagcggaacgccgttccggccgtggtcgaggatgtgatctacctcggtccgacgacgaagtactgggtccgggccggcgagcaccgcctccaggttctccgccagcacgcccggttttttctcgacgagaagccgatccgctggaaggacgatgtctgggtgttctggcacggcgacgacgggttcatgctcgagggcttccggcgggacgatgaaaagctcgtcgccgccccgccccaaaaagtgggggaggcatgaccgccgcggctgggacgggccgggagccgggggcatgaaaaacctccggcgccggggacaggagttcttcctgaccctgccgtcgtttttttggctgtcgttgttttttctcatcccgaccgccctggtcttcatcctcgccttccgcccggccgatcccttcgggggcatcggccgcggctggacgacggccacgatcaaaggcttggccgatccccagtatctcgcgatcgcctggcggacgctgtgggtcagcttcctgtccacggcgttctgcctgctcctggccgtcccgacggcctatgccgtcgcccgggccccggagcgccgccggaatcttctcctcatgcttgtcatcgttccgttttggacgagcttcctgatccgcgtgttcgcttggaagtcgattctccatcccgagggcctcatcaaaaaagccctggttttctgcggcctggtcgatccctcctcccagcttctctataacctgggggcggtcatcctggtgacggtttacacgtttcttcccttcgccatcctcccgatttacgcggccgccgagaaattcgattaccggctcctcgaggccgcccgcgacttgggagcccggcctttccaggctttccggaaggtctttctcccgggcatccggcaggccttggtcacggccgtcctggtcgttttcatcccgtcgctgggatcttacatcgttccggacatcgtcggcggacccggaagcgaaatgcttggcaacaagatcgcccaacgcgtcttcgtcgaccggaatcttcctttggccggagggctttcgatcgttctcatcctggcggtgctggcgccgcttttaggggttctcgccctccaggggaaaaaggcccggatccagccgccggaaggaggcgggaagccgtgaagcgcagccggtttcccttcatcgtcaccggcctcgtcctggtgtttttctatcttccgatccttattctcgtcgtcgattccttcaacgcctcccgcttcggcggggcgtggagaggattttccatcaagtggtacgtccggctgtttcacgagccggccatctggacggccgcccgcaacaccctggtcatcgccttgatcgtgacgttcgtctccctccttctggggacgacgtccgccctggcccttcaccgtttctcaaagtcgcggtttcaacgcgtccattacacgctgatttacacgccgctggtggttcccgagattctgatggggatcagcctcctgatggccttcgtcgccgccggcgtcaagctggggatggggacgatcatcctggcccatgtgacgttctgcatcagctatgtcgccttggtcgtcctgggacggctccaggattttgatttcacggtcgtcgaggccgcccgcgacctgggagcgaccggctggacggcgacccggcgggtgctgctgcccatgctcgcgcccggcttggccgccgccggcctgatcgccttcaccctgtcggtggacgatttcgtcatcacctttttcgtcgccggtcccggatcgaccactctcccgatccgcgtctacagcatgatcaagcacggcgccaccccgcttatcaacgccctttcaaccctgctgctggccctgacgttcacgaccgtgctcgtcagccagcgtttatccaaatccggagctttggagggaggacaatgaagatgcgcacgttcggacggtcggctctgggagcgtttctcgccgcggccggcttattggccgcgggatgcgggggcggagcgaaggccccgggaatcctgcacgtttatacgtggtccgattacgtcaagcccgaattgatcgcccggttcgaggccgagaacaactgcaaagtcgtcatcgacaccttcgattccaacgaggcgatgtacgccaagctgaaggccggagccacgggctacgacgtcatcaccccgacgagctatatggtcagcctgatgcagagccaggggatgcttcttcccctcgaccactcccggctgccgaacctctcccgcgtcgatccggattacctggccatcgccatcgacaaaaccatggcctattccgtgccctacatgctgacgaacacggggatcgcctacctcaagagcaaggtcgcggattttgagccgacctgggggatgttcggccgggcggatctgaaaggccggatggtcatgctgaatgatatgcgggaaacgatcggggcggccctgaagttcctcgggttcagcctcaactcgacgaatcccgaggagctcgaggcggccaaggccgtcgtcctcggctggcgggagaacctggccaagttcgaaaacgaacagtacaagagcgggatcgcctccggcgaatttttcctggtccacggctacaacggcgacatcctccaggtccaggccgaaaacgaggacatcgccttcgctatgccccgggagggcggggtcatctcctgcgacgacctggtgatcgccaagtcggcccgggaggtcaagctcgcccacgcctacatcaacttcttccacgacccggcggtggccgcggaaaacacggaatacatccagttcctctgccccaacaaggattcctatccgttgttgaaggcggagatcacggggaatccggggatttttctgactcccgagatcaaggcccattgcgagatcctggccgatctgggggaaaagaacgtgctttacgtgaagatctgggacgagatcaaagccgggaaatagcgcctccggcgggtttcagccgatccggaggaccttggcgccccggatccgccgccgcttgatttcgccgagggcttggcccgcctcggccagggggtattcctgcaccgcggggcggagagggatttccgcggccagcctgagaaattcgacggcgtccgcccgggtcacattggccacgctcttgatttccttctcccgccagaggtggccggcgtaatcgagcgcccggagcgcgtctttgtccccgtcttccttccggacggcattgatcacaaggcgtccgcccggggccaggcaccgcaaggcctcgacgacggatttccagaccggcgtcgtgtcgatcatcgcgtccaggtcctcgggcggcgtgtccgaggcctcgccggtccaggccgcgcccagctccgcggcgaaaacgcgttcctccgggcttcgggcgaagacgtagaagcgcgtccgcgggaacaaatgccgggcggtctggaggaccaaatgcccggacgctccgaatccggtcaggcccagggcttgtccgtccctcagcccggcgagcttcaacgaacggtagccgacggccccggcgcaaagaaggggagccgcctcggcgtcggtgaaaagggaggggatggagaaggcgaacgactcgccgacgaccatgtactcggcgtacccgccgtcggcgtcgcggccggtcgctcggaattccgggcagagattttcccggccctcaaggcagaaacggcacttgccgcaggccgagaaaatccaggaaacgccgaggcggtctccgagcttgaaccttcgggcgccgggaccgcgggcggcgacccggccgattacctggtggccgggaatgacgggcagccggggaggcggcgttcgcccctcgatctcgtcgatctcggtgtggcagacgccgcaagcggcgatgcggaggaggatttccccttcaccggggacggggagagggagatcgcggctttcgagcggctcgccgctctcccaggcgtcgaggattcgggtgatgagcatggctttcacgggtgtctcccttccagggccggttccggcatggttccggatcgccccgcggcgtctttagattaaagaagaagacttcccgtgtaaatcgttttcgggggatccaaaacgcgcctttttcggatggtgaagggatcggccgtgtaaaaattcattacatcgtataaatcgcggaggtttttttcttttttgtttccaacgattttgcggtttacggccgggctttgttcggggttaagccgatcccgccggccggaatcctctattggcatgtttcatgcttatgttgggatagagatgagaagaacgcgaaacatcatcggttccgttttttgctataatttaaccatgcggatgcagggatgggcgacggcctttccgctcgttctcgttttcattctcgcctcgttcggccaggaatcccttccgccgcagaccgacgtccggacgttcctatccgggctgaaggaggccttcgaatcgtccgatcgagcggcttatttagcttatttcgaagccgaaattcgcgacgccgagggcgcggcctacgattccctcaggcaagcctcgcggatgacccaggccgttttttttccggcgacgaacgtcttcgaggacaaggaaggcgttcctctcttcgttcaggccgtctttcagaacgacctggaagccttgtttgagtcgtgggagctggagctggcccgggacggggagcggcgagtcatccgggccaagagcgtgatcgggaatccagcgatttttctcaagctgaaaattccctcggaccggatcgagcgagccgcccgaattgaaatccgccatgacgatctggaagcgacattcgagaacgcttgggttttttacgacaacatccccgaccgcccgacgggcttgatcatcatcggctcggggcggctgcgttttcggccttcgtcggagacggaacgccaccaactggccttgcggtacaaaaccgaaaatttggacaagccgctggtgtccgcttatttaaggttttccccctcgttttttgcgaaccggatcaaaatcacccccgagaccggcccggccggctcttgtccgcccggggagatcgcgaaagcccgggccttgttccgccgctattacggcggctcgttcacgatcgacaacccgatcgccggggcgcggctttcggtcctgccgcaaagcgaccaggcggtttttgaattcgggaccgactcccggagcgggttcggatatggatattcccccttttcggaggaggagatccatttctggagccgctcgccagaccagcttctctgcctctattctccggatatccgcgaggggaacgaacgaaggatgttcctcaccatgggggaaaaagtcgatatcctccgctgcgacatcgatctggattttcagcccgaccgccgtttcctttccgccttggcccgcatccggctggaagcggcctctccgggggtggacaacctgcggtttgatttccactccgccctggacgttctcaaggtctacgacgcctcgcggcgcgagctgttcttcacccaagacaaggtgaaccgtcttctttacatccggtttctccagcccttggagaagggggaatcggcttccctggacatctattaccgcggggcccttcctccgcccccgccgacgagcgacgccgcggcggcttacggcggattcgccggagcgaatttcatcgatgacggcgatctctacacgccgtcggccggatggtacccggccatgtccgagggggattatttcctttcccggtttcggatcagcctccctccccgctacgtttgcgtggccaacggagagcttgccggagtggaggaagtcgacgaggtccgccgggttctgtcgctggagaaaatcggcaaccggatttctgttttcgagacccggaagccggtcaaggggctggcctttatcgtcgggcgcttccgggaagacgcggtcgacgaggacccgtcgccgcccccgatcaacgtcctcgtgtccgagaacgttcggagcctccgcgggacgctggccggggaagcccgggcgatcgtccggttctacgaagaaacgttcgggcccttcccctatgaaaagctggccatcatccagcgcgtcgccgagacggccggggggcaaagccccgcttccttcgtcatcctcaatgaaccgcggacgggagccacggcgcccgggattccggatttcgggagcccggtggatctccccgggtaccgggagctttttctggcccatgaaatcgcccaccaatggtgggggcatgccgtcagcgcggccacctaccacgacttgtggctgagcgaagggctgtctcaatacgcggccattcgatacttgaggatgaagcacgggaacgacaagcttccgtcgatcctgaaaaaaagcgtttcttggacgaagcgcatggcggattacgggccgattacgctcggcgcccggctgagctatcttgacttccgggctttccaggccatcatctacgggaaatccaccgtggtcctgttcctcctcgcggatttgatcggcgaagaagcgctggaccgcggcctgcgcgccttccaggcttcttcagcctatcgccccgtccggacgggggagttcatccgggccctggaggaagcctccggccgttcgctccgtgactttttccgcggatggatcgattcccatgtgcttccggaagcctcggtgacgcaccagatcctcaaggcggacgaaggctacgaagtgaagattttcgtccgtcaggccggacaggcgatggtttttcccctgaccgtggcctggacggaggacggccggccggtccggcacatcctcgaggtcgactccgaatccaagttttattcctttccggcggccgtcaaaccggtgaagttcaagatcaatccggacgggctcgtccccggaaaattccgctagccggtcctcttcatatattttctaaagatgttatccgttcgatgatgatcttaaggatattcaactcgcgaataaggcaggctaggagcggtccggcgagatctcaagcctcttgatcatctcgttcaaggtggtcggcttcaccccgagaagcgcggccgcggttttttgcacgccgttggccttggccagggcggtttcgatcaggcgccgctgaaaagcgagcgtttgctccttaagatccaacccgtcgccttccgccgccggggcggccgccgcttcccggggcgtccggaacaagtcagggagacagtcccgggtgatgaccttgtcccggctgaagacgaccgtccgctcgacgaggttttcgagctcgcggacgtttcccggccaggagtgacggtccaggatttccaagacatcggggctgacgccctcgatcgtcttgccgttctcccgggcgaagacgtctaaaaaatgcttgaccagcagggggatgtcctcgcggcgctcgcgcagcggcggaaggatgatcttgatgacgttcagccggtaataaagatccttgcggaagagctggcggtcgatcaggtcctcgagctcgacgttcgtcgcggcgatgatccgcacgtcgacccggatggttttcgttccgccgaggcgcatgaattcccggtcctgcatgacccggagaagcttagcctgcgtttccagcccgatggtggagatttcgtcgaaaaagatcgtccccttgtcggccgcctcaaacagcccttgtttctccgagaccgctcccgtgaacgcccccttcacgtgtccgaaaaggtggctttcgaggaggtccggcggaagggcgccgctgttgacgacgatgaacgggaaggaagcccggggcgagttggtgtggatggcccgggcggccagctcctttcctgttccgctttcgccctggaccaggatcgtcgaccgggtgggggcggcggccttgatgagctcgaaaacccgctccatcggccggcttcggccgaggatgttggaaaagctgaattttttccggagctcctcccggaggcggtcgttctcgtccaagagcgttttgtgggccagggcccgctggatcgtcaggaggaggtccccgtgcttgaacggcttctggacgtaatcataagccccgatcttcatcgcctggatggccgactcgaccgaggcgtaagcggtgatgatgatgacgatcgtcgagggctggatctttttgatctccggcaggatctcgaggccgccgcggccgggcatcaggaggtcgaggaggaccaggtcgaagccgtggtcggcgaacttggacagggccgcttcccccgattcggagagcgtgacgtcgtatccctccgcctgcagaagctgttcgagaacgtcgcggatgacgggttcgtcgtcgatgacgtggatggaggcgtgactcatgattctctcgttttcgatttccgccggtcgagatctttcggcagaaagatggtgaatttcgagcccttgccgacttcgctttggacctcgatccggccttcgtgctcgttgatgatcgcatagctgatggacaggccgaggcccgtccccttgccgacccccttcgtcgtgaagaagggatcgaagatgcgcgccaagtgctgttccttgatccccgtcccgctgtcgctgatgacgacgacggcttcgaccggtgtctcccggagctccacccggagccgtccgcccccgggcatcgcgtccagagcgttgaggatgatattgatgaaaacctgctgcaggcgctcgccctgggcccagatgggggcgaccggagccaggtcggtttccagctcgatttccatggcccgaagcttgtagtcgatgagggaaatgatctcctggagagtgtcccggaggtcgatccggtgcatccccggctcggccggattgcgggcgaaggtcaggaggttcttgacgatgcgcgagacgcggtcggtttgagcttcgatcttgcccaggacctgggaaaaacgctcgtcgccgaccgtcttttgaagcatctggacatagctggagatcccggtgagcggggtgttgatctcgtgggcgacgccggccgaaagcaagccgagggaggccagcttttccgaagtcaacaactgctgctggaggcggactttctcggtgatgtcctcgaagacgatgatcgtcccgaagggatgacggcggttgtcccgcagcggcgtcttggcgatgtcgaagatccgcatttcgcccgaggggcggccgatcgggatctctccaacgagatggtattccgactgggtgtccggggggaagatcgcggcgaaggccctcggaccgatgatgtcgctgaggcgttcgccgagaacctcctcccgcttccggttgaacgtctcctcgcagacgcggttccagccgctgatccgtccgttttgatccaggacggcgacgccgaccgtcaggctttcgatgatgttctcgctgtagtctttgagccgttcaagctcggaggcccggaggccggcttggttgtacaggtaggcgttttccacggccaaagccacgggcgaagagatcgtcgtcagcagttcccagtcctcgcgcgtcagaaacgacgtgtcgatcttgcgccccatggccaggcacccgaccagcttgctttcgcccttgagggccagaaaatgatcgaagccggagtcccggaggctctcgagcttcgtttgaagcttgatgtcctcggtcaccgagtagagcgacagggtgttgttctcgaccagggtttcgtagatcttgggatcgaacgtcaggcgtccgcccgcggccgtttcggcgtttccgtgcgcgctgaagatcgtgaaggtggcgctccccgtttcgaccggcagaaggagggcgatcgagcgcagggacaaggcgttggagatcagctcgaggaggcggcgggcgagcgtttcgatgttgcgctcccggctcagctcctgggagatggacaggagcgtcttgcggtactggtagctccgccggtagaagacccggtcgaagagggattgaacgagggtccggaggggggtgaacatggtcgcgcccaggataatggccagggctccgagaagaagggcgttgatcttgttttccgagaagattttcgtttgcgaggagatcccgacgaaaaccagggccaggacgaagtaggaaaaaaccagggtggaggctttcttgaggatgacttccaggtccatcagcttgtagcgggagatcgaataggaaaaggacagggggatgagcgcctggagaagaatggtcagctcggcggccacgctcggcgcggccccggcgacgaagggcacgacgtagagggccgtgaacgggacgacgccgaagcccaggccgtaggcgacccacttaagctgtttgcggatgatgaagctcgggtggcggagcgtcccgtgagcgatcgtcgccagggcgccgagcgtatagagggcgaaatggcccagatccagcttttccagggcggaatacgcctggagaaggcggagctcgccgaggccgccggcggccggaaggaagagggcgatccgggccaggagcagcagcgacgcgggcgcgtagagaagaaacgccgtcccgggtttatcccggagcagcttgactcgctgggggaaaatcaggaagtagtggacgaggagcggcggaaagaccaggaacgcgattttatccaggccgtaaaacaggctgtcgagccagtcgaattccccggtgaaggagaagacgtaaaacatgaacaggaggaccgagagaaaatagtaatgaatgttggtccggcggaacggccgggaggtgttgagaaagacaaccaaggcgatgatgatcgtgatcacgccgatcagggccaaatagaaataaataatgtcggggccctttccgacggggaaaaacgtccccgtgtaggtgatcacgccgccctcccggtagatctcgtacgtgatcttctgcccttgcttccaaacctgccagaggtttttgatcaggtcgattttgctccggacgatgatcttgccgggggcgagattgtgggtgaccgagaagagaacgtcgcccttcttcaagttgaagagataagccggcccgtccttgtcgactttgatcgccgtcagacggccttgtttcatggcccagacgacgccgtcggagggttccttgtaaacgatctggcggtaaacgttgagaacccccaaaacgacgaggatcgtcagggggacgagaagccagatcttccggtctttcatggtgcaatccaaaaaattgaatccatcgtgcctgattcgattgaggccgggcgttcccgtgtcatcggattagtccagaatatgccggcgggcggcccgggcggtccaggcgatcgccggctggcgcatcaaccgttcgagggatttgtccaccttgacgccgagcggcttggtgttttgcgacaagagcgaacgcatgtagtcggtgggcggccgccgggcggggtccgtctcctgcggcggattctcagccgacggcgtcggctgtccgagcccgatcgccgccgccaggagaagggcgggcgcgagaatcccttttaaaacccgtttcttcttcatcccgctttatttaatacccccccgcggccggatgtcaaattcaaaccggcggagaccgcgggcccggccggttcgccggaggcccgcggccggacaattgccaagaggtcgatggattcatagaatagccgcatgaaacgattcgcctggatcgcggccggcggattgctggccggcgcttgcctctcttgttccccggccggaaagccggccggcgtcgcctcgctggaagatttgaaaacggcccgattcggcgtcgtttcggggacggtcgccgatcaattcgtccttaaccgctttccggaagcgacgttcgggtattacccttcgcctctggacgcctgcctggccgtcttgaaaggcaaggaaacggcggcggcctacgacgaaccgatcctccgcaacatccaggcccagaatcccggcttgaagatcctgccggagatgatctccgtcgatcagtatgccatggccgtgcggccggacgaccgggagctgaaggacgcggccgattccctgcttgccgagctgcgggccgacggccggtacgacgagatgaaagcccggtggttcccggaaaaaggaaagccggcgcccatgcccgaaatggcctgggaggcgcccaacgggattcttgatttcggaacctgcgccgtcaccgaaccgttttccttcatcgacgacagccgccgggtcgtcggcttcgatgtcgagctggcctcgcggctggcccggcgcctcggccgtgagctccggatccacaacatggaattcggggcgatgatcccgtcgctgctgtccgggaaaaccgatctcatcgccgcctgcatcacggtcaccgaggagcgggccaagagcgttctcttcaccgagcccgtctaccgcggcgggatcgcggccgcggtgagggattcggccgtcgccggagcagcgccggccttttccggcctggccgacgtcgccgagaaacggatcgcggtgatggtcggctcgacccacgacaagcacatcacggcgaattttccccgggcggaaatccttcggatggacaacgcccccgacatgctcgcggccctcaagtccggaaaatgcgaggcggcgatctttgatgccaacgccggccggctgtaccgggaggacgatccctcgctggccgttctggccgagaagattttcattgaaaacctcggcttcggattcgccgacgtccgcctccgggacgcgttcaatgcctttctcggcgagctccgggcgacgggcgagctggaagagatccggagaaaatgggaaggcgacgacggcgcggccgcgatccccgacctgccggaaggcggggagaacggccggctgcgcatcgccaccacgaccgtcgacattcccttttcctacacgcgggaggagaaaccctgcgggatcgatctggagctggccctccgcttcgccgcccgccaagggctgaagccgcagatccagccccttcccttcgcctcgctgatcgcggccgtcgcctccggcaaagccgacctgatctgcgacggcatcacgatcaccgaggagcgggccaagcaggtcgccttttcggacgcgtattaccaatcggcggcggacgccctcaccctgaaaaaacacctggacggcggaaaccggcccgaagagacgggaagcaaaccggacatcgccgaggccgtcatcggggcgatgaccggctcgacgggggaagcgctcgtccgggagcgttttccccgggccggcatccatctcttcgacgacgtcatggacgccgtcgccgccctgaaagcgcgcaaggtcgattatgtcatcaccgcgtacacgacggccctccaggcggcccgggccaatcccgacctggccgtgcttcccgaggagtacaatcaggcgtgggcggcgatcgccgtccataaagacaatccccggctgctcgagcggatcaacgcggttctcgaagaaatgagggacgatgggacgttggaggaaatcatcagccactgggtccggccggacggctcgccctacgtgaaaaccgaggtgccgcgggcgtccgggtggccggctctccgggtggccgtcgcggccaaccgggagcccatgggattcatcgaggacaataaaatcgtcggcctcgatcccgagctgatcgaacggatcgccttcaagctgggccgcccggtcgtcttcaccgacatgaagttctccgccctgatcgcggctctcgaatccgggaaggcggacgtcgtttgttcaaacctgacggcgaccgaggagcgccggcggagagtcgccttttccgagggctattacgtcaatccccaggtcatgatgacgcttaaggaccggccgccggccgccggcgccgctctctgcccctcctggccggcccggctcaagaagagcttcgtcgacaacatcatccgggaaaagcgctacctgttgatctggaacggattgaaagtcacggccctcatcgccgtcctttcggccctccttggaacgctgctcggagccctcatctgcctgatgcggatgggaaggaatcgggctttgaaagcgttcgccaaggcctacatcagcctcctgcgcggcatcccccaagtggtcctgctgatgctgatgttctatgtcgttttcgccccgctggacgtgagcggggtggccgtggcgatcttcaccttcgccctgaacttcgccgcctatgtctcggaaatgttccgggccggaatcgaaagcgtgaaacgggggcaggtggaagccggcgtggccatgggcttcagccggttccggacgttcgtccatatcgtcctgccccaggcggtccagcgcattctgccggtgttcaagggcgagttcgtcgccctggtgaagatgaccgccatcgtgggctacatcgccgtccaggacctgaccaaggccagcgacatcatccggagccggacgttcgacgccttcttccccttggtcatggtggccgtcctctacttcatcctggcttggggcctgacctcgcttctggaaatgattcgggtccgggtcaacccgaaaaggagaaggccgtgaaagcttcctgtccgtccgccggctcgggcgacgtcctgatccgggtcgagcacctggccaagtgcttcggagagaccgtcgtcctgaaggatgtcaacgctgagatcaagcggggcgaggtcatctcgatcatcgggccgtcgggcacgggcaagagcacgtttctccgctgcctgaacctgctggagcgtccttccggcggccatatctgggtggacggacgggacgtcctcgatccgaggaacgatcccaacgccttgcggcggaaaatgggaatggtcttccagaatttcaacctcttcgaacacatgaccgtgctggacaatctgacgatcggcccggtgaagctcttgcggaaaacgcgcggggaggcggaaacgcgggcccgcggcctgctcgccctggtcgggctggccgcccgggaaaatgctttccccgacgagctgtccggcggccagcagcagcgcgtggccatcgcccgttgcctgtcgatggatcccgagatcatcctcttcgacgagccgacctcggctctcgacccgacgatggtgagcgaggtgctgggcgtcatccgccgcctggccgccgacggcatgaccatggccatcgtcacccatgagatgcggttcgcccgagacgtctcccgccgcgtcttctacatggacgagggcgtcatttacgaggaagggccgccggccggaatcttcgacgccccgaagcgggagaaaacccgggccttcatcttccgcatccgcaatttccaatatcacatcgccgacgagaagtacgatctctatgatctgaaggccgggatcgaggcgttctgcggccggcacttttttccggccgcggccgtggccgacctccttttggttgtcgaggagacgcttcagctttgcttccgggagggcgacgcggccgcccgggccggcctcgtttccggcgcgggggggctggatctgaccgtgggctactccgagcaagaaaatgaaaccaccctcctcttcacggccggcgaggtcctgaagaccattctcaacgagacggccgaatcggacggattgagccgggccctcatcgccggcatgacccgatccctccgcgaggatatcagaggcgggaaggtcgttctgacggccgtgatgcgggagcccggatcatagacgtcagatcgcgcccggtgtttttgagcggagaaaaggacgaaccgcctcggcgaacagacggttgaagaccgcctttccccgaaagttcaaatgggagttgctcttgccccagcctccgtcccggaagaggtccgggttgtccagatcgaaccggtcgggccggttgaaatccaggacggcggcgttgccgtgaaggccggccagggccccgacgtcctccttgaaccgggcttgttcgaagttcgtttcgttcgtcccgatgaaatccgggatgaaaacgagaacgactggaacgccgtccttttcaaggacggtcaggagttttgccaggtccttgccctcggctcccggccgggcttggtaacggcggggctcgaacggccggcgcttcctggggtctgaggaaagcggaggggaatgatccggattttcgtcccgtcctttgccttgatccgcggccggcggcatcacctcgtcctcctccgttctcagacggagcagagcgccgaggaaatcatcgatctccggttttttccggaagagccgggaaaggcggctcaggaggggagaggcgtcattgaccccgtccccgggattcagggcgtgagcctcgaaggcgggatccaatattcgaagctccgacggcagggtcttcttctcgaacatgaagtaatccatcccgtagacgacggccgcgggcctgcggttctcccggcggtagcggagataatacaaatcgaaatatcggggataccgcccggccgcggcgttcttgatgatttttttcccgagatgggcggcgagcgtctcctggtcgaaggcccgggccgagcgggaggttccgaaaatcaggatctctccgtcgccttcgccggcggagaccgtcgccgtcttcccggccgaaggtcccggcccggcggcgtaataccgtccggcccaggcgcggaggccgagcaggagaaggcggtcgaaggccgcgaacgaaacgaggaagacgaggaccgccgggacggccgccgcccggcgtttccgggggacggaggagaaggacatgacggagggaagtatatcgggccgttttccggccgtcaaaccggacggcaaattgacacggtcggccgtttgccctaatctagtaaacggtttccccctagcggaaagggcgggatcgaaacgccatgtcttcctatatttgccggatcgccgacgacgccgggacggtcttccgccggacttttccggcttccaccgcctcggactgccgccggcatttcgagtcggaaggattttgcgtcctgtccgtccgccgcgaacggcggaagatcggaagccttctgcggggatccgaggggaaaatcaaggcccgcgatttcatcatgttcaaccaggaattcacggccatgatccgggccggattcccggtgctccgctgcctggagacgatcggcggccggacgaagaatcccgccctgaagaacgttctgggcagggtggaaaacgacatccgccacggcaaagccttgtccgaagccttcgctccgttcgaggaccgcttctcgaaggtttacacggcggccttgatggccggggaaatcagcggaaccctgcccgagacgatcggccaatacgtcagctatgccaagaccatcgaccggacggcccgccgggtccgcgcggccctgacgtatccgaccttgatcatctgtttttccgcgggcctgctgcttcttttgatcaatttcgtcctgcccaatttttccgagttttacgctgatttcgaaacgagccttccgtacctgacttcggccctcatccagttttccctttttctccgccggaactggatcatctggccggttctggccgcggccctcgtcgtcctcgcctggcggatgaagcggaatccggacatgagacgccgctgggaccggctgaagctccgggtgcccgtggctcggtccctgatcgtcgaatcggcggtctccctcttcagccggacgctgagccttctcctgggcgcgggagcttcgctcgtagacgccgtcgccctggcctcccaagccgtccccaacaagcacctggccggccggatggagcccgtgcccgccggcatccgcaacggcgaggcgttttccgaggccttgagcaaaacgaattttttccccccgatggccctggatctcgtccgcatcggagaatcctcggccaacctcagcgggatgctccgcgagctggccgacgtcaccgaggagcggatccaacagaagctcgacacgctcgtctcgctcgtcgagcccgtcgtcatcattctcaccggcgtgctggtggccgggatgctcctggccgtttatctccccattttccgaatcattcaagtggcccggtgatccgatgacccccccgccttcccgtccctccgctccggccgattccgaagccgtccgtcggctcgccgatcgctgcggcgtccccttcaccgacctggccgacgtccggatcgaccgggacctggttcaatcgttccccccggaattcctctaccgggccaacgtcatccccctcgaggacgacggggcgaatctccgcgtcgccgtcgccgatccctccgacctggagacgatcgacgccatccggaccctctccggcaggaatgtcgtggtcgaagccgcgcctccccgggccattcaggaggccctccgcaagagcgaaacggccctccaggttctcaagggagcgaccgagggctttatccagcagctcgtggaaaaggaaggcggggaggaggaggaggtcatctccctggagaagctggccgaccaggacggctcgatcatcaagctggtcaacacgatcatcttcacggccgtccagaagcgggcttccgacatccatatcgaatccaaggacgacaacgtccacgtcaagtaccggatcgacggcgtcctgggcgaggccatggagcccatcgacaagaaattccaggcgccgatcatctcccgaatcaaggtcatgtccgacctggacatcgccgagcgccgcgtcccccaagacggccggttccgtctgaagatcaaggacaagacgatcgatttccgcgtctcgatcatgccctccatctacggtgaggattcggtggtccggatcctcgacaaggaaatgatcacggaggccatctccgagctcaagctcgacctgctcggcttctccgacgacgtcctccggcgcttccggcgctacatcgcccagccgtacggcatggtcctggtgaccgggccgacgggaagcggcaagacgacgaccttgtacgccgccttgaccgagatccggtcggtcgaggacaagatcgtcaccatcgaggacccggtcgaataccaggtcgacggcatcacccagattccggtcaatgagaagaaggggctgacattcgcccggggcttgcgctcgatcctccggcatgatcccgataaaatcatggtgggggagatccgcgatccggagacggcccaaatcgccatccagtccgccctgaccggccacctcgttttcacgaccgtccatgccaacaacgtcttcgacgtcatcggccgcttccttcacatgcaggtcgatccgtacagcttcatctccgccctgaactgcattctggcccagcggctggtccggctgctctgttccaagtgcaagacgcccgtccgctacccggacgaggcgctgcgggaatccggcctcgacccggaacggtaccgggagcgcgtgttttatgaggccggcgggtgcgcggagtgcggattcacaggttaccacggccggacggccatcgccgagatcctcgacctctcggacacggtccgggagatgatcctgatccgcaagcctttgtccgaggtccgcaagagagccaaggcggagggaatggtttccatccgggacgtcggcgtcggaaaggtcctgtccggtttgaccagcctcaaggaattgaataaagtcacgtttgtggaataagccatggccgcgtttattgattcctggatcaggcgcctaacggccccggacattcccgcggccgtcttccatgtcgcccgtggatccctcggcggtctgcgccgcgcccgccaatccgcgtcggtgaaaagctccgtcgtccggagccttccggccggtctcgtggagccgtcgttcgacaagccgaatcttccccggccggaggagtttcaatcggcggtcaaggacgccgtccgccggatcgggtcgccggaaggaccggtcgccctcctccttccggaaacgtccgttaaaaccgtcctcctgagcttcgactcgctgccgcccgctcccgacgagcgggaaaagatcatccgctggcggctggcccggacgctcccgctgcccccggccgagacgcggttgtcgttcgccgtcagccggacaaacggccgggcccgggcgttttgcgtcctggccgccgccggagtcgtccgggaatacgaacaggcgttcgccgcggccgggctggatgtccgaacagtcggccttccgacgccggccctgctcggctgcctgccgaaaaacggaccggcgaaccaggtaatcgtcaacatcgaggaggattatttcgccgccctggcgattctcgacggcggaccggcgctgttccgggtgaagcccctctcgacggggaatttatgggaagaagcggccgaggaaaccgcggccaccctccgtttcctcgaggaccgggaaaagaaggaaatcgaaagcgtctggctgcggccggccgcgggcggggacgccgggacgggcgcggccctcatccaaagccgcgtttcccgtcccgtccggattctgccgggcgacggatcgacggggattccgccggccgaccggatccgcctggccccccttcttggacagatctcatgaacggcggcctgcgccttccgatcaacctggccacccggccgctgcggaaccggcgcttgttccgggcggcggtcgggattccggtggtcctttttcttctcttcggcgggggggcgggggtccttctcctccattcgaccgcccgcctgagggccgacgagcggacccgggccgagctcgagcgccgcatccaatcggccggacgcgaacgagcggataaaaccgggcagagccagacgatgaggaaacgggattccgagctcgtcgacgtggtcaacggcgtcatcgtccggaagaatttttcctgggtggggcttttctcccgcttggaacaagccctgccgccgcagtgctcgatcgtctcgctcagcccgcttcagctgaccgaaacagggcttcgggtcaacatgaaagtcattactccgggcctgcccggccttctggtcttgattgaaaacctgacggcccggggtttcaaggacgtggttctgcgggatgagctgacgggcggcggccggctcatctgcgaaatcggatttgattataatggaactctttgacctcttggacgaaggcgagcgccggatcgtttccatcgcggccgtcgtctgcgccgcggtgttcgccgttcttctcgtgttcggggtcagggcttggctgaacgccggccgggcgtccgcccggcgggcggcggtcgagacggagtggcgggcggccgaccaggcccggaaggccgccgtcgccgaatggagccgttgggacggggcctcggccgacgtccgggagctccgcgggacgtggctgtacgaccgggggaggggaatccagacgatgcgctccgacctggccgatgttttaaaaaaggcgggcgcgtcggtcccggaaatcatgtacggggaatccgaggtggtcaagaaccggatgcggcggtacaccgtcggcttccattgggccggttcttatcccgctttccgccggctcttggaaaccctcgaggcccatccccgggcgctgttcgtctccaaggtggatttccgggtcatcgtcgagggacacttggaagccggcgtcacgctggaaggatatgccgtcgatgaataagcctgaccggcggggaatcgtgtttgtcgccgccgtgctctgcctcggggccctggcggcggccgggccggatgcccccccgcccctgatccgccgggatcttctccgaaaagaagccccggtttttccgaagatcgtccgcgatccgttttcgacggtcgtcttcatcgtcgactccggcgaaagcggggagccttcggatttgacggggaaggagctgtccccggctgagacgccgccgcctccccctcccccggtcgtccgctacatcggattcgcccggtacgccgctcccggcccgccggccgccatcctcgtgatcaacgggcggccctgggccctggccgaaggcgaaaccgcccccaacggctggacggccctcaagatcacggacaaggagatcaccttgcgaagcccggaagggaatacgctggtgttcctttatgaaggagaacgcccatgaaaaaagcgaccgcgctggcgatcctcgttcttttgaccgccgcggcctgcgcgaccatcagccccgtctatcatcagggcgttcgggcggaaatcgcccagaattgggacgaggcgatcgctctttatgagaaagccgccctcatgaatcccaaggaacccgcgtaccggctggctctggcccaggtgaaggtcaaagccggcttgttcttcacggatgaggcccgccgccttctcgccttgggggaaaaggacgcggccgccgcggcctatgccaaggcggtgagctacaatccccgcgattccgccctcctttttgaggccaagcaggccctctcgcccgagacgaagaaggacgccggtccgtcgaaaatcgagtttccgatcaagctcaaggtccgggaaggggcgctcgatctccgcctgtcggcggaaacgtccctgcgggcggtcctccaatccctgggccgggccgggcgggtcaacatcattttcgatgaggcgttccgggacgtcccctttcagaccgatttcacgaatgtgaccttcgaacaagccctgggaacagtctgccaggcgaccaagaatttctaccggatcattgacgagcggacggtcatcatcgtccccgaccagccggccaagcggcttcaatatgaagtgagctgcatccggacgttctacttgtccaatgcccaggcccaagagatgaccgcctccctgaccaacatgctccgcggcgcggccaagatccccttgatcttcttcgacaaggatctcaacagcgtcacgatccgggacacgcctcaggtcatcgagctggccgaaaagctcatccggatctgggacaagcccaagggcgaggtcgtcatcgacatggagcttttggaggtttcccggacgcggctccgtcagctgggcttgtcgctcgaccagaataaagtcggcttgagatacggggcgccgctggccgagaattcgtcgtccgccggctgggagcagctctcgaagatcgatttatccaagagcgaaaattatttcgtgaacctgccggtcgcctatctccagtttctcgagaccgattcggacacaaagatcgtcgcccagccgcgcctgcgggggctggccgacgaggaaatccaccagctcgtcggcgagaaggtccccgtccccaagacgacgtggaatcccatcgccgccggcggctacagccagcagccggtgacgtcctacgattaccaggacgtcgggatcgacatcacgttcaccccccgggttcatctggagaaggaagtgaccctggccatggagctcaagattacctcgctcgggggaaagggatacgccgatctgccgatcatcaacacccgcgagctcaagggaacgctccgcctgcgggacggcgagacgacgatgttcgccggcctcctccgcgacgcggagcggaaatccctctccggcatccccttcctgaagaaccttccggggatcggccggctgttcggggcggaggacacgaccatcgagcagacggacatcatcatgaccatcacgcctcacatcgtccggaccgtcccgatcggagcggaggatgaacaagtcctttgggtggatatcaacgcttccggatccggaagccgcggcgaggccgaggcggaagaagagatcttcccggaatcggacctcgaagaggaagtccggctccaaccccgcccgcggccgggaagcgaaagacgcaacgtcatccttctcgggccggccaatatggaagtccccgccggccgagaattccggatgactgtcggcgttctcaccgaggccgagatcgggtcggccgccgtaaccctcagtttcaatcccagcgtgctagccgtgaaaagcgttcaggacgggggattgggccggtcgctgggagagaacgccccgtttcttcagaactacgacaacggctccgggacgtgcacgatcggtttcacgagcccggtcgccgggaagggcgtgcgccggggcggcaccctggccgcgattgttttcgaggccaaagccgccggggaatcggtcgtggccgtgagccagagcctggtgacggatccgtccggccaaaacctcgactttcagatcaaccaggcgcggatccgggtccgctagggtccgggcggacggagggcgccggaccggcggaccgatgatcacgattctgacgggaccggtcggcggcggaaaaaccacgtttttgaaagccgtcgtcggccgcctggcggcgctcgggcggccgcccgacggctatctcagcgagcgggcgggggacggccgtccggcgcccggctatgatctcctggacctgcgcaccggccggcggattccttttcttcgaatcgcgggggccgcggacggcctccggacgggcgcctttgatgttcttcccggcggcctggccgcagccgcggatatcatcggccgaagcgatccctcccgtctgcttatcatcgatgagctcggccgcttggagcttggcgggaggggcgtttggccggcggccgccccggtcttcgccgacgcccggaggtcctgcctcgtcgtcgtccgggacacgttgatggaggatttccaaaagcgctggccggcgaggattgcggttgcggtcgttccgctgcctccctcgcgtgatccggaaattctcatccgcgccctcccggcggggaatcgcctatgaaaggacccggccggacgaccatgaccgtgcgggtcaggtttttcgccgcgttccggcagacgttcggcggcaaggaaaggattttcgagctcgaggaggggacgacgctcggctgcctcttggaacggctaggggattcctccgcccgccgggccgagcttttcgccgccccggaggccggaaagcctcccgctctccaccctcatatcgtcgtcatggtcaacggagagaacgcgtccgcccggggcggatggaacggggagctgcgggcgggcgacacggtcgccgttttccccttgatgggagggggatgaattgggtatcctgaaccgatgagcggttcgtccttcggttttttcggccggtaccttgaaatcgatttgacgtcggccgccgtccgcgtccgtcccctcgacgccgatctcgttgccaattacatcggcggccgcggcctggccactcgtctctttcgcgatgaggccgatccggccgccgatcccctcgagcccgggaacgtcatcgtcatcgccgcctccccgctcgtcgggacgaacgcccccacggcggcccgcggccacatggtctttcactcgccgctttcgggcttgatcgggacgtcgaattccggcggaagctggggattcgccttcaaggccacgggccacgacgccctggtcatcaagggaaaagcgccggagccggtctggatcgacatcacgccggcgggcgcggcgatccacccggccgggacgctttggggggaggacatccacgcgacgacggacgccctgacctccgggttcagcccggccgaccgaccgcgcgtcctctgcatcggtccggccggggagaatctcgtccggttcgccgacgtggccaatgaccgcaaccgggtttacgggcgcggcggaccgggcgcggtctggggttcaaaaaacctgaaggcggtccgcgtctccggaaaggaaaaaatccggatccgggatcccgagcgctacaagtcgggatatgatcaggcgttccatctcctgcggcaggccccggtgaccaagcggctcctgcgcgaactcgggacggccggcctggtcgagctcatcaacgtcatcgggatgctgccccgccgcaatttccaggattgcgctcaccgggacgaggacctggagcggatctcgggcgaaaccatcgcccggaccattctggagcgagccgccggctgccatctctgtcccatcggctgtcagcgccgcacccggatcgtccgggcgggatcgccggacgaatccggagagggtccggagtacgaaaccgtcgtcctgatggggccggtctgcgacgtctacgacctggcggccatcacgacggccaattaccgctgcaacgagctgggtttggacacgatcagcttcggcggaacggtcgcctgcgccatggagctggccgaggccggcgccctgccgccggatttcgacggcggccgggggctgcgtttcggaaacgccgccgtcctggagcggctggccgtcgatgtcgcccatcgccgggggccgggggatcttttagccgagggatcctggcggctggcctcgagctgcggccatcccgaggcgtccatgtcggtcaaacggatggagatcccggcatacgatccccgggcttcgttcacccaagcgttgggttacatgacctcgccgtcgggagcctgtcatcttcgcggcggctacgccgtttccctggcgtttttcgggggggctaaggaaatcccccgcttcagcctcctccagtccccgatcgccattcggaacatgcagaatatcggaatcctccaggacagcctgggcgtctgccgtttcaccgggtacgccttcgggagcgatccctggtcgcggatgctctccggggcgaccggcatggatttttcggtcgcccgcctcgaggagatcgccaaccggatcgccgaccttgagcgcctattcaacctggaggccggggccgttccagctgacgacgcgctcccggcccggttcgccgaatcgccggtcgtcgtcgccggagaaaaccggatcgtcagccgggaaacccaggagcggatgcgccgggattattaccaagtccgcggctgggacgcgaacggccgtccggccgccgggccgaggccgccgcgccgtctcgatccacccgaagggaggcggccatgagccctcgaaactggaccgcgaacgacgagatcttccggctgtttcaggcggtcggacgagcgtcccttctggccgacatccaagacagccattccggcaatatggccgtcaaggtcaagggcgaggacggatccgacgtcatcgtcatcaccgcggccggttcccagaagggcgatctcgagccggagcagatctgcttcctttcggcgacggaaacggattacggctactacaaggcgtcctccgagaccgacatccatcagcggatcctccgcctccctggcgtcggcgcctccatgcacgcccatacgaaggagctggcgatcgccaccctggacgacgagccgaagcccgctcggccgccggatttcgttcccatcgatcccttgggccggcacgtcctcggggagcgggtggcggtcgactggttcgccgtgccgagcggctcgccggagatggccgaaacggtgccgtggcgcctggccggccggccggtgacgacgatccaaggccatgggacgttcgcccggggccggacgctccaggaggccttttttcttctggccgcggccgacaacgccgggaaggtcgtcaacgccgcccggcggctgaaggtggacgtggaagggcttcgggccggaatgctcgcccggccctcgggcttcttcgtccggccgcccgatccctacgcggtcgaggacgacgaggcctgcgatttccccgaggagaccgaaatccttaaggaattccgcaaggccggggccaggatcttcgaatcgttcctctcgccgttccacaccggctcgatgtcggtccgcggggttggcgatctgctgtacgccccgaaggcgtcgatgccgcgcggccttcccgggccgctgcgccggcggccgatccggccggaaggaaccgactcgcccgagctggcccttcataaggcgatctacgccgaatcggattttcagacggtcatgcattgctggctgccggaggcggaagcccacgcctatttccggtacccgggcgaggagaccgcggccgaccggattgttccggtggacgccgagggcggcttccagtatctcgtcatccccgtcctgccggcggacgccggcccggaggccctgatccgcggcctgcatgattacaaagtggccgtcatccggggcggcggagtctgggcggccggtcaccagtcgctctcggaggtcctccaccatccgtcgtcggtgagggaaatctgtctctaccggatcggcgccttcgagcgcggcctggacctgcgccggatggagcccgccaaggcgaaaaagtggtagaataaaaatatccgcccatcaaggagattttgatgaataagagaatgatcctgtggggcttggcggccgccctggcgctggccgccggagccttcagtcaagaggcgaaaaagatgacctaccccgtgaccaagaccgtcgaccaggtcgatgattatttcgggacgaaagtcgccgacccgtaccgctggcttgaagacgaccgttcggccgagaccgaggcatgggtcaaggcccagaacgccgtgacgttcggccatctcgaacagatccccttccgcgaggcgctgaagaagcggctgatggatatctacaactatccccggtattcggcgccgttccgggtcggcgggcattatttcttctccaagaacgacgggcttcaaaaccagtccgtcatctatatccagaaaggcctcgaggggacgcccgaggtgttcatcgatccgaacgcgctttcggccgatggaaccatcaaaatctatctcctcggtccctccggctgcaagacgaaaatggcgatcatgcgcggagaagccggatcggattggggcgagatccgggtgatggacatcgccacgaaagccgagcttcccgaccggatccgctgggtgaaattctccggaaccgcctggtggaaggacggattcttctacagccgttatgaccagcccccggccggcggggagctgacggccaagaacgagttccagaaggtgttctatcacaagctcggcgatccccaggaaaaggacatccttgtctaccaggatacgaagaatccgcttctctacttctcggtcagcgtcagcgaggacgagaaatacgcctttctgacggtcagcgccggaacgtcgggaacggagttgtactggaaatccctcgaagcgcccgggacggaattttccctcctcatccccgggttcgaagcggacagctatgtcctggacaacatcggggacaagtttctcgtccagaccaacctccatgcgcccaacgccaggatcgtcctcgtcgacccgcgggagccggccgagaacaagtggacgacgatcatcccggaaaagctcgaggtgttgagcggggccgggatggccggggggaagcttttctgctcctatttaaaggatgccagcacgaaggtcttccagcatgagccggacggagccctgattcgggaagtcgcccttccgggcctcggttcagcgggcggattcggcggctggaaggacgaccgggtcgttttttacacgttcacctcctacaactatccgacgacgattttcaagttcgacatcgcctcgggagcttcggaggtcttccgcaagcccgaggtgaaattcaatcccgaggatttcacggtcaagcaggtcttctacgccagcaaggacgggacgaaggtgccgatgttcatcgtccataagaaaggcctggccctggacggcggcaatccctgcttcctgacggcctacggcggcttcaacatcagcctccagccttccttctctccggcccatatcgccttgctcgagaacggcgtcgtcttcgccgagcccaacctgcgcggcgggggggaatacggcgaaacgtggcacaaggccggcatgctcggcaacaagcagaacgttttcgacgacttcattgccgcggccgagtacttgatcgctgaaaaatatacctcgccggaacggctcggcatcgagggcgggagcaacggcggtctcctggtcggcgcctgcatgacccagagacccgatctcttcagggtcgccctgcctgccgtcggagtcatggacatgctccgattccacaagttcaccgtcggttggggctggatcgtcgaatacggatcgagcgacaacgagaaggatttcgcctacctctacaagtattcgcctctccataacctcaaggccggcgtccgctacccggcgacgctcgtcaccacggccgaccacgacgaccgcgtcgtcccggcccattcgtttaagttcatcgccgccttgcagaaatgccaggccggcccggagcccgtactgatccggatcgaaacccgaagcggccacggatcgtccaacctgacgaagggcatcgagatcacggccgatacgttttccttcttcctgttccacacgggagccaaggtcgcctcctgaccgcgctcccgggaaaacccgtcccgccccctcccttcgcggggagggggctttttttataggctcccgggcccggatggggcatcagggacgaaacaaaacgagcgccccggcaagaagtcggcgagccgttcgaccgggcggaaggaaccgccgctggaatcagagcaggacttccgcgaggggattcggaagtcccggcggattctcggctgaagatcgcccccgaggggcgcttgggccgccgacgttgacggaacggcctcctccgattatgattccccggacgggaggtttccatgaaacacgcggccctgaggatcggagcggttctggtttcggcttttttcctcgcggcctgccgggactccggcccggcgggaaaagccgaggggatcgtcgggggcatcggcttggcccggatcacggtgtacgaccaacggccgggacccgacggccttttttccggcgcgccgtacatgcgggccgtgacggacgagggattctacgtcatgaacgggaccggacggctcgagctgcacgacgttcgcaaagggtttcgttcgatcaacctctcgccgggacggtatgtccaggttccgccctgcactcttctccggctcgtgggaaccgaccatcttgtcgttctcagcctcagggccgggcccgggaaggaggccggggaggaggacgtccggctttatttcggccaggccgcggacgaaaacccggcggagtatgagcgcctggccggcggcgccggagtcgagggtcttgagggagcgctcaagcgccgggacgaagccgtccgggcttacggctcgttttcctcgctgtggtcgttcgaccgggtcgcttactacaaggagctggagcgtttcgtcggtcatgtcttgaacgcggccgcggccgggcggaatcagctcggggacgggaaggcaggctccggctggacggcccggcaccgggcgcggctgaatgacctgcccctcaaccgcgatgaaatcccggccgtcttcttcttccctccggagaaggaaagcctgggctggagcggtcttgtcctccaggtgacgggcctggacgcggtcaaataggggcgcgtttggccgggctcgttcggtctttcatgaggccctggccgcggcctccattcccgccttaaggaaggaatcccatgcgcctggctcccctcgattggatcgtcatcgtcggctcgactctcctctgctatatcccggccctgttctacggccgccgggccggccgaagcacggcggagttctttgtctccggccgcgccgtgccgtggtggctggccggcatttccatggtcgcgacgacgttttcgagcgacacgcccaaccttgtgacggacatcgtccgccgcaacggcgtggccggcaactgggtctggtgggccttcaccctgaccggggtggcgaccgtcttcttcttcgcccgcctttggcgccggtcgggggtgataaccgacctggagttctacgaagtccgctattccggcaaggccgccggagtcgtccgcgggttccgctccgtctatctcggcctctttttcaactgcatgatcatggctacggtcaatctggccgcctgcaagatcgccgccctgctgttcggcctcaaccgcttcgagacgctgctcatcgtcggcctcttgaacctgtttttcgccgccttctccggcctgtggggcgttctggtcatcgacatgatccagttcttcgtcatgatgaccgcggtcgtctcggtggcgtacttcgccgtccggcacgtcggcgggctgccggcgatgatcacggccgtctcggccaaggccgggccggggggattgaactacctgagcatgctcccggatttcaagaaccactgggacatcgccctggccgtgttcatcatgcccctcgccgtccagtggtggtcggtctggtatccgggggccgagcccggcggcggcagttatatcgctcagcgcatgctggcctccaagtcggaaaaggactcgctgggcgcggtcctctttttcaacctcgcccattacgtcctgcggccctggccctggatcctggtcgccctttgttcgctggtcgtcttccccaacctggccgacatccaggcggcctttccggggctcgatccgacgcttctcgggcatgacatcgcctatccggccatgttcaagttcatgccgatcggcttcttcggcctcatcatcggcggcttgatcgcggccaactcctccaccgtcctgactcatctcaactggggggcctcctatctcgttcatgacttttatcggcgctttctccgccgggacgccacggaaaagcattatgtcctggtcggccggatggccacgatcttcctgtttttcgcctccagcgccctggtcttcgtcctggagacggccaaggacagcttcgacatcatcctccaagtcggggccgggacgggcttgctgtacttggcccgctggttctggtggcgggtcaacgcgtggtgcgaggtcgtggccatggtcagctcgttcctcgtctccatcggcctgctcgtcctgcgccgggccggaaccgtcgtcccgacccattacgccctgatgatcacggtcgccgtgacgacggtctgctgggtggccacggctttcctcggcccgcggaccgacaagaaaacgctcctcgatttctacaagaaagtccgtccgttcgggccggggtggaaggcggtccgggccgaggccggaccggccgccggcggcggccgggggacccatgaaagcatccccttggccctcgtcgggtggagcacgggctgcgcggtgatctggtcggccctgtttttggtgggcaacatcctgtacggccggtggaattacgccgcgatcctcggtgtggttttcgtcgcctgcggcctcgtcctgatccgggtggtcaaccgcctatggacgagcaaggccgaaacggcggccgcggccgccggggagggaaaggaatcatgaacatcgggcggttttatcggaaggccgtggccgcggggatcgcggccgacctgcgggggaagaaggaaatcgaccgcctcttggccgaggcggccgaggagtacaagggcgccgccgcggaggacaaggaattcttcgatcgggaccgcctgttcaatccctatgccgacacgcgcctgctgaccggcgatccggagacgccggtccgccggatcctcgccgggatcgatatcgacggcggcgagctccatctggcccgttccctcaaccgggagccggccggtccgaagatcgacctggttttaagccatcaccccctgggtccggcccagtaccggatgtacgacgtgatgcgcctgcaagccgggctgctggcgctccacggggtgacggtctccgtcgccgagcagttgatggacaagcggatcgaggaagtggagcggcggcttctgccggccaacgccactcgaacgatggacctggcccgggccctcggcttgcccctcatatgcctccacacggtcgccgacaattgcgtgacgaactacctgacgaaactgttcgcggcgaaaaaaccgtcccggctcaaggatctcgttcgtctgctccgggcgatccccgaatacgagaggtccttccgcctccaggctccgccgaagatcattaacggcaaggactcccattcctgcgggaagatcttcgtcgacatgaccggcgggaccgagggagccaaggagatcttcgacaagctggtttccggcggggtgagcacgatcgtcgggatgcacatgtccgaggagcatttggcgaacgcccggaaggccgggatcaacgtggtcatcgccgggcatatcgccagcgacgtcctcggcctgaacctgctcctggacgacgtcgaaaaggacgggcgcctggactatgtctgcgtcagcggcttcgagcgcatccggcggatgaagccggaatcgaagcaagccgggcgacgccgttctccgcctccccggtgatttccggtcccggccgaagcgaggctccgatcatcgggatctccgagacggctccccgctcggccgggttcttcaggcctcttccctcgaggggaaaccagcgagaagacagcggcacccgtcaggagccgagtcgaccctcggtctcctctcgatcgccgcatcccgttttaatcgtgaggccgaaattctcgttcgtttgcggcgtctctctcagggcatctccggataaagcagcgaattgaggagaaacttgtatgtcccgtgcgattgggcccgggactggcaggcgatgccgatcaggacgacgcgcccctttttatgcggggcgtcgaccacggccgccttccgggcgatggtctcctcgcccatgatccacccgctgagcaggagatcctcttcgggataactggccacgaccttccggtcccaatcggccgtttggggaatccaagtctccagagccgggctcccgctgaagaccgcggccgccgtctccggcattccgtacccgagaggcgtcgcgttgtcgacggaaatcttcagaatcgacatcgggcagaaaaatttcgtccggtcggccttgtctaagatgtcgcgggcgggcggctcgaaatccttgagggccagcttgcacgcttcgttcagggtgacgaggatcccgccgtcctcgacaaaagctttgaggttgtcgatcccctccttttccaggccgccctcgtactcgggaggcagcggagagaaccaccgggcccaaggcgaggcgggatcgaccttgcccgtcttgatcaggtcgtagggttcgccggcgaagacgatgacgtcgaaccgggccttgaggtcgaccttggccggctccttcgccttgcccgccttcggcgccttgaaatcagcgttgtggagggtggtgtaggggactcccaggtcgtcgaacatatagcgcgtccagccctcgtcctggctggaccaccaggactggtagaggccgatgcgcggattcttgaggaccgacttcggaagagcgtccgcctcggcgagcggatggacggaaagacgcagcttttccaaaagcgccgggagggccttctggacggccggcgtgttcttgacgatgaagctgcccggcgcggcctcgaaaccggacccgatgatcttgcccttggaccggtggacttcggccttgtccttgagcagggcgaagacggccgcgtaggaggcgttcgtccggcaatcgaagaccagccagggcgtcgcctcgccggggacgacgatatccggggacggcgtccggtcgatcttttcgagctcggccgcaaacggcttgccgatttcctcgcaggcgacgcccatctgcagcggcagagtccagccggcgttgtcgtaggggacggcgggcggcccgcccgcgtattcacggatatcgggatacttctgccgctcgagcagggcccaggcgaacggcttgttaggctgggccatgaggatgacgaaggatccggccgggtagacgcggttgccggcccggaattccttcttcgcccggtggatttccacgccccccatttgaaggacgtcgagcatcttgagcatcgtgggggggtcgggctggacggccggaacaacgaaggcgtacggctgtccggtctcgacggtttcgacggagtgcttgttcatccggtaggtgttgagcaggaattcctctttatacaaggaggccgtgcgaaggaggctcagggaaagcgtcagctcgtaatcgacgatgtcccgcaggcgccaccagccgccgggccagggatcgggaaactcgatccgcttttgcgtgtaggatgtcgggatttcggtgggctcgatgaagaggggcgtggccagcccgaccgaggccatctcgctcagcaggccgagaatgttgtggagccaggaggtgtcgtcgcaggctccgatgtaccagccggtgaagctccggccgtgaacgacgcccttgaagccgtttttctggaggtcgtagcccaggttggcgccaagcaggttgacgccccgccagacgagcggctggacattcgggacgggaggattcatgaacggggggatgaagagacgggctccgtcggaccccatctggtgctggtcgaggtggatctgggggaaccagtcgtgataaagaacctggttgacggcccgcgtttcactgaggttggacatgaaccagtcgcggttgttgtcgtggccggcgtaatgatggtagagccagggcatgtccccgccctcgaacttggtcccgaggtttttcttgtaccagtcgacttccatctggttgccgtcgggattggacgtcgggacgaggaggaaaatgacgtcccggaggacggccgcggcgtcgaagggcgtatccccggtgactaatttataggccagctccatcgacatctgggaggcggcgatctccgtggcgtggaggctgcacgtgacgaggacgatgaccttgccgtcccgggccagcttctccgcttcggccgccggaagggtccgtggatccttaagcttggcggaaatcgctttgtattcatccagccgggccatgttttcctcggccgtgacgacggccatgatcatcggccgcttcagggtggaggtcccgatggtctcgatcctgatcttcggcgattccgaggccagcttcttgaaataggcctggatttgttcgtagtcggccagcttgcggtcggcgccgatcttgaagcccaggaatgcttcgggcgatgtttgagcggggaggaacaggggcgcgaggagaagggcgaagagggcggccgcgccggctttcagggagtctttcttcaacatgaaaacctccatgcgcgaatcagttccttttttctaccactgccgccggccggagtcaaacaaatcgtggctcgatgacgtttcgggatgtcggatgatgagatattccacccggttcgtcatggagcctcggctcggttcggggccggccgtcggcggagacgcgggccgcgatccggcccggatgttttccgcccaagccgccgattcggatgacaagcgaaagcaatcccccgggctcgaggccggcgttcggccgggccgtcgagcggtccgcggttgcttgccggcttgaacgggccgcccggcgcgcaagagcaagcctttcattgacttggccggccggttcgtctagaatttggtcccccaggcggcgtagctcagttggtcagagcatgcggctcatatccgcagagtccggggttcaaatccctgcgccgccacttcatttcccttcttgcttttccgccccgcggttgaagacgccccgccgtgttaaaataggtccggaggaaacgagccaccctgggtcattcatgagtcgagacggcttcggtcgcggagcgaaggcggtccgaccgactcgttgggagggaaatgcttatggcccgtatcgaagagacaatcatcgagggatgagaatccttgattatttgaaataaggcgggataaaggaaatgggagaagcgctcaccggcgccgggaagcggatcgcggcggggaggaaggcggtgagccgaacgcccggtctcgtttcgatggtccgccggacgatcctccgccgcggcctggccgctcccggggacctgatcctggcggcctgctcgggcggggcggactcgaccgcccttctccatgtcttgcacgatctgcggacggagttctctttccgcctggccgtggcccatttcgaccacggcttgcgggcttcttccggccgggacgcccggttcgttcatgagttggcggcgtctttcggccttcccttccattatgaaaagaaggacgtccgggccgccgcccgcaagcacggctggaacctggaagaagccggacgccgcctccggtacgattttttatgccgggcggcggttgaaacgggcgcggcccgaatcgccaccggccacacgctcgacgaccaggccgagaccgtcctgatgcgaatcctccgcgggagcgggccgcgcggcttggccggcatcgccccaatccgcgaaggcctgatcatccgccccctgatcgaggcccggcgcaaggagatcgaagcgttcctccgggcccggaagatcgttccctgcgaggacgaaaccaaccgcgacccggcttttctccgcaatgacgtccggcgccggctggtcccgtatctggagaggaattacgagccggccgtcgccgagaagctcggccggatggccgaaatcctggaggccgaggatcggttcctggaagcgcacgttcggcgaatcctgcccggcctggtccagggggaaagcgccgaggcgcgtttgaacgccgacgccctggcgtttctgccgaccggtctctcccgccgctgcatccgggctttcatcgaggaccggaaaggcgacctgctccgcgtctccttcgacgacgtcgagaacgtccggactctccgggaggggaaaacggccgttcttcccggaggaatccggctgatccgagagggcgcctggatccggcgggcggccggccgtcggccgggccaaaggacagccaagggattccgccgacgctgggacgggactgttcccctggcggtcgtcgaaacgggcgccgttttcacagcccgccgctttcgggggggggccctctcgaaattcccctttgacgacgctcgccgggtcttcctcgacgccggccgcctcgttttcccgctgatcgtccggtctccgcgggccggcgaccgctaccggccggtcggctcgccgggccggcggaagatcaatgagatgctccggggccggggcgtccccgtttccgagcgcggactcaggaccgtcttcgaatcgggcggggagatcgcctgggtggaggggcttcccgcggccgaggcgttccgaatcggcccgtccacccgccgcgtccttcgaatcgagaaggacgtttcttaaaggcaggtcccgcgccagatttcgaagaccagcaaagcccagagctggtggctgaaattttcccggccggcggcatgggcgtcgatcatccggcggatcggggcgtaggcgaaccatccgccctcccggatccgtttttcgctcagagtctcctccatcaagtcccgaaggtcggtcgccagccaatgcttgatcgggatgctgaatccctcttttttccgatagagcgtctcccgcgggaggagccgctcgagcgttttcttgaagatccacttcgtcgttccgccgcggagcttccagtcgcccggcagacggaaggcgaattcgacgagcttgtggtcgagcagcggttcccgggcttccagcgagacggccatgctcatccggtcgactttaaccatgatgtcgtcgacgagatacgtcttgaagtccaggtagagctccccggtccggtcgtcgaatccgttcatcgcctggaagtaagccggaaacggctcccggcgccggagcgctccgatcccgccgatcgcctcccggaacgccggtccgtagagctcccgcttcatcccatccgagaggaacatcatccaccggagatgccggtggccggcgtcctggtcaaacgcttgggtgaacctccggatcttgttccaggtccccttcttttttttcgagggcggcaaccggccggcgaccgctccggccgcccgggcggccgccgcgacgcccggccagcgggccatccgctgggccaagtaatgctcgtagccggcgaagagctcatccccgccgtcgcccgacagggccacggccacccgccggcgggccatctcggagaccaggtacgtgggaaagatggagaaatcgcccagcggctcatccaaatgccggacgagcttttcggtcaattccagggctttcggctcgagaacgagctcctcgtgctcggtctggaatctctcggcgatccggcgggcatgggccagctcgttgtaggtcggatcggtgaatccgatcgagaatgtccggagcggctcggccccgagctcgcgcatcaggccgaccacggccgaggaatcgatgcccccgctgaggaatgcgccgagggggacgtcgctcaccaggcggagcttgacggattccttgagaagagcgtacagctcgtcctgggcggcggagaacgaggccggcggccgcggatccggatcgggctcgacgtcccagtatcgtttgacctcgatccggccgtctttccacgtcaggaaatggccggccgggagcttgaagacgtttttgaacatcgcgtagggggccgggacgtattcaagggtcaagtaaaagtcgagggcggccggctcgacctcccgccggacgtccggatgaatgaggatggttttcagctcggatccgaaaaccagcgtccggtcggggagttgcgtgtagtagagcggcttgaccccgacccggtcgcgcatcaagagaagcgtttccgtccgcttgtcccacaacgcgaaggcgaacatcccccggaaccgttcgatgaaggccggcgcgccccattcctcgtaggcgtggacgatcgtctcggtatcggaccgggtcgagaaaacatggccgcggttccgcagctcgtcccggatttcggcgaagttgtaggcctcgccgttgtaggcgatccagatcgtgccgtcctcattggagaggggctggtggccccccttgacgtcgatgatgctcaaccggcggttgcccagcccggcccggccgtcggcgtagaccccctcgtcgtcgggaccgcggtggacgatggtcccgcacatccggccgaccagctcccgggaaaacgccgctccttccgccgtccggaccagcccgcagatgccgcacatcgccatcagggggaaaccagttcgggagtgaagaagacgccgagccagcggcgctcgtcgcttttcttgtcctcgaaataggggatggatcccttggccgccttgatcctcacccggtacatgcgggcgggctcgacccggaatcccggaccgacggggaatcggagctcggcccgggcgtgggggccgagggtgaccgtcttccgtctgcccccgacccagaccgtgaccttgttttcgaggcgcgggttgttaaggacgtggaagacgatttccttcaccggggccgaggtccggaggatgaattcggccttgcggtcgccgagcgtccaccagccgttctcctcccggtgcttgacgttgaagttgtcgttgagaaaataaaggaagcggtcgtcgaagagcggctcgccccaccgctggcggaaggcggccggattggtgttcgtcggcaggtcgttgatcagggtcagctcgaccgggaagcacgtgaacgggaaacgcttggcgttgtcggccggcgcgtgggccgcctggatcggcgaaaccaggatcggggcgatcaggagagcggccgcggcccattcagcggcgagacgcttcgggcggaggtccgcgccggggagaaagaaaaacagcggatagatccccatgaaatacctgttggccagcgaaccgccgccgccgccgaaattgtccggcatgagaatgacgtagatcaggatttcccccgtcagggcggctaagagcagccagcggtcgagggttttccggccgaggaagaagaaaaccagggccaggaaagcggggaaaaaataccaggccatgccgctgaaccggccgaagatgaaataaaacaggttgatgggaacgaacttcgcgggccggagggcccgttcaagatagccgtcggcggtcatcagccggccttgggcggtatcgaaggtgagctcgggccgctcgtaggggaagctgaaatagaagctcttccgctcgccgccctggtagttccaatccccggtcagaagaacgttggtcccgaagagggctccgaaggagacggtgaatacaaggatcaggacgagggctttgcccggccgtttcttcaggatggtccacaggagcaagggtccgaagacggcgacattgggcggcttggcgtaggcgacgattccggcgaccgcggccgcgccgtaatcggacgcgtccgagagaaggaaagccgtccagcgaccgctccaagattttcgcccgggcgttttttccggcggggcgtccgccgttccgccctcggcccgccggtgtttgtacagccagaggaacagaaccgtgaaaacgcagaacaagttgaagaaatccggggcgatccacagggcatatgccccggcgaccgaggcgcaaaggtaggtcatgatgcgcaggagcgacaggcccgggcggttgtggagggagaaaaaggccaagcccatcagcaggaggagagcgacgagaagagcgtgaaaaacgatcggtccgttggccccgaagatccggacaaacggggcggcgaacagggcgtaggccatggacttggcgaaatagagcttctccccggccggcgtcatgacccgtttcaggaacaggccttgcggcccggcccagaaccgctccttgtaccggatgagatccttcttcgtgtattccaggtcatggtcgtaggccaggctttgggcgatggaaaagtaagtcgcctggtcggcggcgagaaatcccgcgtgaagggccggaaggtcggcggacagggcgaatcccagaaagaccgcgcttatcaggaggacggccgttagggcgtcctttttgtccgataacatggtttctatcaataccataatcaaaggggacaggtcaaaaccaagtccctctcggtctgttttttgtttattgagggaaccgcgccaaataggcggcgatgatccggtcgccccagacaagggcgacgtaagcggcgggggcgagaaaagacccgaagggcagggcgaatttcatgtcccggccctggagcttcattagaaggaggccgaagatcgccccggcgaacgaagccaggatcagggtcaaaagcgtcttttcccatcccagaaacgccccgatcatcagcatgaacgtcacgtcgccgaagccgaggccttctcttttccggatcaggcggtagaatccgtaaaccaggaggagaaatcctccgccggccgcggcgccgagaagcgccccgccgggagtcaaatcgtcgcggaagaacgcgtaggcgaaacccaaaacaatccccggaaaagtgagggcgtcgggaaggatctgatgacgggcgtcgatgaaggccagggcgatcagcccgctggtaaacagggccgaggcgaaaaacgacagggtgaatccgcccgcccggacgtagaggacggccaggagaaccggcgtcagaagttcgacggccggatatctcaagctgatcggcgcccggcagcggcggcacttgccccggagaatcaggtaggacagaacggggatgttttcatacggcttgatccgggcgccgcacgaggggcaggacgagggcgggcggagcaggctcatccgccgcgggacccggtggatgacgacgttgaggaagctgccccaggccaggccgaagacgacgacgaggatcagcgcttccatggaatcaccgctgttttgacctcgcccgtcttcgggtcgtacaagtaatctttcccgtcgaaatccttcgggacggccgcgatcaggcgggtggacgcgagctcgtcgagtcgtcgggcggcgcgtccgcggatttcccggaaccgttccagggcggcgttcaaggcggcgatgtcgacggacgccttgatgttgtacaagtgattactggcgattttcttgatttcgcggtcaggcgcggtttcgtagacctcgcgccaggtctcccaggacgtctggtagtccattgtcttgaaggcggcattggcgaagagacgccgggcgatggccggcgcctcggggaggtccatcgccttccggtagtagcttttggcccgctcgtagtcccggagataaagctggcagtaatggccggcttcgaaggggaagatccaggccccgggattgcgggccgcgccgtcgtcgtacatcttcagggcgagctccgggtcccggaagtcgtgatgggcgatcaaagccgctgtgagatatggatccatccagttcgggtcgaggtcggcgatgacctcgaagatgcggttgaagtggcggcggcggtccgggacggccgtgttgccgtagtactgaatcgcccagacataggaaacgtcggccgtcagcgaggaaaagccgaaaacggcggccttcacggccggtccggacggcaggtagacgatgccggccccggggatcttcgcccggggcatcccgtcaagcccgactttgataccggcgaggccgcccagcaggaggagcagggcggccggggcaagcggtgtttttctggccatggctcagacgaaatcccgccgccggaaaatcaagacggccagcagcaggacgaaggccgtgtagacgaccgcgtagccggccgcgccgagtccgaagccggagggaagcggcaggttctggacgacctccgtcttgatgttgaaattctccaggtcgggaaggatcgcgtccaagacccggagcagggtccggccgatccccggaggggttttccggatcagggtgtccagcccccaggagaaatggccgatcaggtagaagctgagggcgaacagcgagctgaggatcggcgtggagaaacaggaaaagagaacggccacggccgtcagaagcatcagctccagaaagatgaagaaaaccgccggcaacatctggatttcaagagtgaacgtgtggaggaagacgacggccagcgagatcacggtcatggccgcgaccatggccgccagggtcaggacgagaccgagatattttcccaacaggaactccgaccggcggaggggcttggaaatcagagtgaagatcgtccgcttttcaatctccttgtaaaccagccccgtcccgatgaggatggccatcaaagccccgaagaaggcgatcgaagccaagcagacgtccttgacgactttgacccggtcgcccacggtcaggacggccaggacccgggccaggatgatcgacagggatgagaaaaagagaaggaggtagaggatccggtcgcggacggcctccttgaacgtgtggcgggcgatgaccaggatcgtcatcggcgggccaccgtgtcgacgaaaatatcctcgagcgtctgcgtccggggaaccaaggcgtggatccggccgccgcgctcgcggaccaggtcgaggagcggctgaacccgggtttcgtcgaagaccttgagaagcgttcggccttcccgcgtctggaggcggtcgccgaagtccgccagcgacgcgtcatcgacgccggccagggtgatctcggtgaacaggattttttccgagacgagatcggaaaggcggccctggctgaggatccggcctccgacgatgattgccacccggtcgcagatcatctcgatgtcctggaggatgtgggaggtgaagaggaccgtccggccggccgcgcggagaccgaggatgatatcccggatctccttccggccgagcggatcgaggccgccgagcggctcgtccaggatcacgaattccggctcgttgatgagcgcttgagccaggccgatgcgctggagcatcccccgggaatatttccgcagcgcctgttcggcggctctctccagcccgacgagccggagaaggcggtcgatgcgcccggcccgctcggttttgtccacccggctgagctgggcataaaagtcgaggaattcgcgcccggaaaggtgatcataaaaataaggattctccggcagaaaaccgagccggtcctttgaccggggattcaagggggaccggccgaagagggagacggtcccggcatcggggaagaccaagccgagaacgcacttgatcgtcgtcgttttgccggctccgttgggcccgaggtatccgaagatttcccccgcggcgaccgtgaaggagacgcctgtcaggacctcccgcttcttggggatgaatcccggccggaacgatttgcggacatccgccaattccagcacgtttcccatgatcggccgttattatagcacaagggcggccggcggctcaggcggacgtggaatcgggaaagggcgctcggcggcggccgattcatgatagaataacggcatcgccaaggaggtttcgcatgaaattcaagccggttctcatcgcgatcgttttcatgacggccgccctctccgcgtcctgcctggcttccatcccttacggggaatacggcgccgagccgtcccaaggatggaacgcgtcgagccgcttaaaagacttggcccgcgatttagcggaccgggccgccgagatcgccgataggatcgacagccagatcgacgaccggtacggctcttgggccgataatcagatggacgccttgttcgcggcggatcatttcgccgccgccggccggacgttctaccgcctggcagggcggctggaatatgggtcgcgcgcttccgtgaggccgggcctccagcgggcctaccgctatcttcttgggacgttccgcgacctcgaatcggccgcccggggcgggacgcgcgtcccctccctatacgactgttcctcccttctccggcggatcgagcaggagatcggcggggactggggccggccctcgccggatatggaccaggtcgaccgcgaccgcctcaaggaaaaaagctgggaaggcaagtacgccaagggccgcggcgcggccgtgtacctgatcgagcggcgcgggccgggcgatttgatccgccggccgttcaaggacctcgagagtctctttaaatacaatttcgaccaaaaccggggaaacaatccgtgggggcatgtcgccgatatcccccaggagacgctcgaccggatgcggacgggcgagacgatcagccggagcttcgagggattgatggtcatcgaacccggatcgttgccgaaccgttccgtttatctgattcagggcggaaaaaaacgaggcttgtccaagcctgatctcgtcacccggtacggcggctggaaaaaagtctatgagattcccaaggaaatcatcagaggatatccggacggcgatcccatccaatgagtttccgttttcccttttgccccccctctcccttgagaggggttatgcgggctgttgtcagcaaaaggggggttgatgatgggaaccataaggtgggggctttctccagcccgcaaaagaaagccgtacacaatataaacgaagaaatttaaaaaagcaagagggaagcttcaagggacttcctgtcgtcgcggcctttgccgcggagagaaggccttgtcgaaacagcggaaggaggcaaccatggatgagaaaaaaatcgacatcaaggtggacgaagccgtggccgtgggccaatacgccaacgtggccgccatccgtcattcgcgggaggaattcatctttgatttcgcctttcttttccccgatcatccggccggcaagctcatcgcccgcctgatcctcagccccgcccacgccaagcgtttcctgggcgcgctgacgtccaacatccagggctatgaggcaagctacggccccctcccttcggccgaaacgccgccggtcggcttcgttcattgagacggccgggcctcgggcccggctgtcttgacaatcgccggaattttcgttatcaatgggacaagatcagagacatgatggagaatccaataaaaacgatcaggccggattttgggaaatggatgaaggcaccaatccactggaggtaatatcccatggcgttcgaatttaaaaattccaaaggggccagctacttccttcacgcgaaaaacgtgactctcaagggcggccggcagcagacgatctattatttcggcaaagaggtcaaggaaggcgccctcgacgcggtgccggccggataccaggttgtcgaaactcccaagaccggcatgccgatcctcaagaaaaaataagatctcctctttgactgccttcccggatccggggggattcccccccggatttgttcattcttcgaacgccatttcattctttccctcgttccgatccggaatgtaaccggacgaaacgcgccgcgattcctttttccttgaaaaagggcgttctccgcatgaaagtgagcatgcgtcccctatcgaggacagccccggccggcgaaatgtccttgccgacaggggaaaagttattggcatggaagttgcaatttaagaggtcgcaaggagacgaagatgaaaaaactcatgaccttggcgatcacggcggtcgcggcgtttccgttcctggccttcgggcaatccgagggctactacgaccggagcttcacccggttgagttacgtcaagggcgacgtttatatccagcgcgctcaggacctgggttatgagctcggcgaagtgaacctcgtcgtcgtggaaggcgacaagctcggaacgcgggaaggccgggcggaaatccagctcggccggggcaacattctgcgcctcgaccgggagacccaagtcgacctcgccgggctccccgggagggacggcgatcccaccaaaatccaccttatccagggcagcgtctttttccgggtccgggatttggaccgggagaaaaatcttcagatccatacgcccgacgcgtccttttacgtccttgaggccggcctgtaccggctggacgtctcgtcgaacagccgcacggacctctccgtgtacagcggccaggccgaagcggccggtgaggacggatccgttctcgtccgctcgggggaaatgattacggccgccgaaggccggtggagcggagggccgtccggcctgttcgcccgccgggacgattttgagtcgtggaacgaatcgcgcgatgcattgtacgcccggcgcttgagccggacttatctgcccgcggattatgccgactatgactatgagttggcggactacggccggtggtgctacgaggccgactacggctatgtttgggtgccgacgatttacgacgccggctggcggccgtattatcacggccgctgggtctggtatccgatcatcggctggacctgggtgtccgctgagccttggggctggtgcacctcgcattacggccggtggggctggcgctacggcctgggctggtattggattccgatgcatcgctggtcgtgggggccggcctgggtccactggtacaatcattacgattacatcggctggtgccccctcagctattgggattaccctgtcgtcatcattaacaaccatttctacggacggcatcacggcggatgggaccgtcaccgggactactcccggtcgatgaccgtcgtccgccggagccagctgcaagaccggtccatttcccggatcgcccttaatgaccggtccggcctcgacctcggccggatttcgctcggggccgcccagcccgacatccggcccgccctcgaacggacgtcgaccttagccggccgggcccgcgaggcgatcaaccgcggcgcgctccgccgcgtcggcgagggcttcactccctcggccggacggccggcgcccgtgaacggccgggacctccgggccccggaaatcaagcgtccggacggcgacgcgccttcccgcgagctgggaaccagccgcacgccctattcgtccggacgtctggctgagcggggaacgccggaaacgccccgtcccgccgccgaacgcctgatccgtcccgatgccggcgggcggccgaacttttccggagagggaaagccggccggcggaaaggaaccggggacgatgagggtttatccctcccgatcctcctcgccgtcccgcctggccgatctggccaagcgctccttctcctcccctccgcgcgacgaccgcccggcgattcggaaagaagatccttcctcccggtcttcctcgccggggatccgggcgtatccgagctcggctccttcgccgtcgcggcggggggaaccttcttcccgttcttccgaagaacgcgtccgctcctcgttccctgaaaggccgtcctcgccggggatccgggcgtatccgagctcgactcctccgttctcgaaggacgcgtcttcttcctcccggttcaataaccggccgtcgcggctcatgtcctcctcccgttcgtccgacgagccgtcccgctcttataccagcccgtcccggcgcttgtcttccccggagcggtcttattcgagtaaaatccggccgcgattctcttcctcccccccgcgaagctcctcctcttcgccccgctcctctgatttttcgtcccggtcgtacgagaggccgccacggagctcttcctcttcccgctcgtataatgcgccctcccggatctcttcttcctcttcctcccggtccgtctcgagatcctcctcttcttcctcctcctcgcgctcatccgggaagccgtcccggtcctcctcgtcttcttcgaagtcctcctcctcgagcggctcgaaatcatcgggttccccccgccggcggtaggccgcggggggggcggaaaggctcaaaaaaagatttgacagagcgttttttttgggcttacaatcgcagacagcgacggaagggaaaagatccgcccgaaaacgaggggcagatcgtcaccgctccgccggaaaggaaggatatctcatgagaaagcggttgttggtcgggaccgctctcctggcgtttttagccgggctcgcggtcatgtcgtttgcggcgccccagcttcagcccccggggcagaagtacaagatcaccctggtcaatggaacggtcatggaaggggagatcgtcgcggtcacggagaaaaccatttccatccgggacgtgtccctgggcgtgatcgccgtcgcccgggagaacgtgctgaaaatcgagccgcccctggacgaggggaccggcgcggccgcgccgccgaggcccgctcccgccccggcgcccgtccgctattcgagtgagccgtccgccggcaacggcgggcccaagatcggcttcagcttgagcggcggcctgggcttcatcaacggcggagacttcaacgcgtacatccgggactggaatacgtacgtcgcggattacaatgatcattacggcaaggattactacaccatcgattggaaggaaatgaagtcgatgacgaatttcaagggcgaggtcctcgcccggttcggccggaacttcggcgtcggcctcggtgtggaattcatcaagaaaaccaatccgggcaacctggcctacgatgacaccggcgcgaccacgtatgattattcctggtattacgtcgattattcctattacgatcacaataaaaacgtctatgaccagacgctgagcgtcacgcccatcaccctcagcttttactattatcttccccttgatcacatgggcgaggtttacttcaacgccggcgccggctactacctcggatccctgaaatccgatatggactacgaggggacctggggttattacaatgagtaccactgggccgacggggatctttggcctccccattacaaatccgattcgcaagacagcgaaaccgatcatttcgaggcgacttgcaacacaatgggatttcatttcggagccggcttcaattataacctgaccgaaaacatcgccctgttcggcgaggcgttttaccggctggccaacttcaaggattgggaggggaccgccagctacgattaccaataccacagggattacggctggtggaccggaagcgcctggacgacccattatgttgcggagagttccagcgacgacgagtgggacggcaacatctggtactacaactggcacagctccacgttcgacgccgattactccgaaatcggcctttacgaggacaagccggaagataccagttcccggagcgatatccggaaagcggccatcgatatcaacggcttcgccttcagggtcggggtcaagttcttcttcggcctcggcggacgccgctaggatccagcggctcttcccgccctccctctcccgggagggcgggaagggtcagggagcgtcgacgaattcgcccatgcgtttgtccttccggacccggttccaagggaagcaccgcccgttcatggagatgtaaacccccggggggagagtctggacgaaagccagggagcttcccaggttgaacatcccgtccgagcttccgaatttataggggatcatggccccggtcaggacgatggtctttccctcgacgcgctcggccaggaaccgggccgtctcgaccatggtgtcggttccgtgcgtcacgacgatccggtcctcggggacggcccggcaattgtcggcgatgatcagccggtcggcctcggtcatctccaggctgtcgatcatcatcaaggtccggatttccaggttgagccggcaccggccgagtttcagcatttccgaaaggtgggtatccttgaaatagagagaccccgtgagctcattgtactccttgtcgaacgtccccccggtgatgaaaacgcggatggccatgagatctttccttggatgaagtcggtattttgaatataccgggggctggaaatcctgtcaatggagccgctttgctttttcctccccgcggtgttataattccggcccgtatcgcggtggatcgactcttctttggaggtatgcgctatgtttcataaggccgatatgatgaaattcgcaagcctgagcctcacggccctccttctcctgacgtcggcggtcgcttgcggcaaaaaagccgccgagccggcggcgatggaaggcgcagtcgccgaaacgaccgagtccgggctgtcgatcgtcatcggtttgaacacggtggaaggaacggtcaaggacgccaagggaagctacttcttcatggatgaagttcccgggttcgacgtctgcgtcacgggccccgtcgagggcggcgacgcggcggccctgatcgggaaaccggtccggatcaaaggcctcttcaataaggacctgcccaatcttcttgtcgcccagtcgatcgaaatcaaggaaggcgaggagcggttccggagcgtctacacctcgaccgccgccgccgccccccaggacttcttcaaccagaagtcccggaatgaatatccctccctggccctgacgaaattcgataggaacgcggattgggaaggcaaggggaagggcaaggccttcggagctctggttcccgggaccgccggcgccgccgaccgcatttcgatcatgggcgccgacgggaaggaagtcggcaaggtgatcgtcgattcgaaatcgaccttcgcggaattctatgccggaaagctgaaactgttcgacaaggtctggttctatctgaacatcaaggacagcgtggacaaggcgctccgggccaagagcaaggagatgttccatgccgacgtcgtcttcatcgggctctactgagcgggccggacgcatccgctgatttttcaggccggttcccccgcgggggaaccggccttttttttcagccgggctggtttctcgaagatgtctcaagaagaaaagcatcgcccggacaatggatgcccggccgtccccgccttcacgatatccgccctcccgacaggaaaaagcgttttctcaaaaacaggaattgatcccggcgggctcagaacaagcgctcgacggctttggaaatcccctcgaccgggtcccgcttgaagtgtatgcgggccacgggccggcctttttcccgaagggcctgccggtcgcccagggcttgggcgtcgatcagatttccgaaggaataagcggatcccccgccttcaggcgaggaggggacggccgtgtccttggggtggactccggtcagttggatgaagatccccgctccgccgtctcccttgtgaagctggccggtggaatgaaggaaacgggggccgtagtcgaagacgacgggccgtcccgtgcgcgtctcgatgcggccggccagcgtccggagggcttccgtggtttcgggggagggggggaggaacgcttggatcgcggcgtacccgccgtccctgaatttattaaacagcgtccgaaatcccgagcggagtccgacttcccgtttttccccgtagaaggcgagggtttcttcctcccaggtggaggattcttccggaaacgtccggcttttcataaagacattcaaggccgcttccgtttttttcttggaaagcgcgacgttcggctggtcgaagggattgatccccaagacggtcccggcgacggccgtggcgaattcccagaggaagaattgcgccccgagctcgatcgggtcctcgagggtcatcgaaatcaccggctcgccgcgttcccgggctttattcacggactcggccagggccgcgtcgccggccagcccgatggcgaccgtcaggcggtcgccggccggttgggaagatggagcggccgtcggccggacgatcggcaggatcccttgaccttcttttcccgtgctttcggccaggagctgttccacccaagccccgaaatcttggaggggggcggacatcaggaaaaccgccttgtcccggcccgcccgggccagcgtccccaggatgatccccaggttcgcccctggattttccccggcccggaggcggcggcaggttccaaccgcttcgcgggcctcgctgagaaacgcccgcagcggcaggccgagcagggcggcgggcacgagaccgaagggggaaaaaaccgagaaacgtccgccgatatcgggatttccgggaaagatccggcggaagccgaggcggcgggcttcggactcgagaaaggatcccggatccgtgatggccgcgaacgaggccgccgccggagccgggccgagccgctcgcgcgtccgggcatggaaatagttcatgaacgaggcggtctccagggtcgttccggatttggaggaaatcaagaacagggttttcccttccggaagggtccgggcgcagcgaagcacggccgccgggtcggtgctgtcgagaacctcgagactgaggccgtccgccggcgggccgaagatccggctgaacacctcaggggcaaggctggagccgcccatgccgcacaaaaggacgcgggaaaagcaggcgttcttgatttccgcggcgaaggattcggcctcttccaggaacgggaccgcggccgccggggcttccagccatcccagccggttggaaatctccacgtcctccgtcttccagacggtcggatcgtgtttccaaatgcggccgatgattccgtcccggtcgaagcggagctgttcccgggaaatcgcctcgccgtaaggctcgagattggaggcggagatggaaagactcatggtctcgggcctattgtatgtccggccggggtcgggaatcaatcggcgttttactcctcctccccgccttgatataatgccgcccttgggattccattccaaacagcttttcggcggaggtcgcgtgaataaaaaacgaatcatcctcgttcttatggcggccgggatcgttttttcggctcccggcggaatcgcggcccgagcccaggatgtcccggccgggagtgagaccgtcgaagccatcctcggctcctgggctcttgaagtcaacgccgaaggggagttctatgatctcaccctggtcttgagcctgaaggagggccggctggccggcgagctgagcgaggcgaatggatggttttccaatgtcccgctggccgaacccgcctgggacgggaagatcttgaaattcacggtcgtcacgcctactccgccggacggggccgaccggacatggtcggccgaaatgaagaaatcggaggaccgttgggccggttggatcgctctccccgaactcggaatgagcgtcccggtcaccggggcccggcgatgaccgccccggagaccgccggattttttcaccccgcgcgtccgttctaccgcttttccgtcctctttttcgtcgccctcctttccttcgggagctatttcgcctacgatatcgtctcggccatcgccccgacgctggtcgaggatcttaacgccgcccgggggacggtcggggcctttttcaccgcctacagcgtggccgccatcctggccgttcttctcggcggaatgttgatcgacaagctgggaacccgcaaatcctccctgatcttctccctcctcgttttcaccggcgcgctcatcgtctggaaagcgaaaaccgttccgctcctcctcgccggacggttcatcttcggcgccggctcggaaccgctcatcgtcgcccagtcggcgatcctggcccgctggttcaaggacaaggagttggccttttccttcggcctgtctctgaccttcagccgcttggggtccctgttcgctttcaacaccggcgagctcttcaccagctactacgggacgtaccgggcggccctcttcgtggccatggccgcctgcggcgtctcgctggcggccaacctggtctatatcgtcatggaccgccggggcgagcgcgtcctccgtcttcgggacgaaagccagggggagaagatcgtgttctcctccctcaagtcgttcaagccgtcgttctggtacgtgacgttcctctgtctgaccttctacgcggcgattttccccttcaccaacctgtcgacggatttcttcgtcgacaagtgggggatcgcccgggtggccgaggggacgggcggattcctggcccgggtgttcgataacctgctccatctcttcaccacggccgggggcatttcctcgatcatcatcttcgcctccatgatcctggcgccgttcgccggcaagctcgtcgaccggatcggccggcgggcgaccctgatgatcttcgggtcgctgatcctcatccccagccacctggccatgggcttgacccggatttatccggtctatccgatgctggccctgggagcggctttcgtcctcgtccccgccgccctgtggccgtcgattccgctgatcgtcaagagcgagcgggtcgggacggcgttcgggacgatgacggccatccaaaacgtcgggatggccgtctttcccctgctcaacggcttgctccgggactggacgcattcctataccgcgagcatggtgatgttcgcctgcctcggggtcgtcggcctcgtcttcgccctccttttgcggcgggccgatcaacgggagggaggggtgctggagcgggcgggccggtgatcgaaaccgtcgtttccgatctgggcaacgtcctcctccggttcgacaactccgttttttaccgggcgatcgcccggttttccggccggccggagaaagaaatcgaagcggtcgtcgccgacaatctcgatcttctcgttctctttgaaaaaggcgctctttcgccgtatgatttctaccggaattcccgcgacctgctggaatggacgggcggatacgaagaatttttctcggcctactgcgagggcgtgttcacgccggtcccggctgtcctcggcctcttccggaagctgagatcccgctatcggacggtccttctttccaacaccgacgtcatccgctggacgcacgtcaagacgacattccccgaccttttgatcttcgacgagtatatcctctcgttcgatgtcggtttccgaaagccgcagctcgagatctacctcgaggcgattcgcgccggccgggccgctcccgggcggacggcgttcatcgacgaccttccggacaatgtggccggcgccgagcgcgcgggaatgaagggcattttatgtccgcccggagaaaatctcgagccgaaactgcgtgatttgggcctgattttttaatttaaaaaatcgcttgacagccgcggacgaaaggcttatcgtggcattgcaatacaacatattgtattaaaaatgccaaggaaccacaatatataggcgattgggcgcgcctgttttttgtttcttgtggtccccgccggcatttataagaggaggagaggagccgatgaactcaagagtcatcacccggatcaagaagcgggacggggaaattgttgatttcacccaggacaagatcaccaacgcgatcttcaaggccatgaaatcgcagggaatcgatgactactcccaggccaaaacagtctcggatatcgtgacgttcgtcttggaggacaagttcggcggctacacggtcccctcggtcgagcagatccaggacatggttgagcatgtcctgatgaagaggggatacctcgaggtcgccaagtcctatatcctctaccgggagcgccacaagagcatccgggaagccaagcagacgggaatcaacctcgagcgcctgatccgggattacattgacgagcacgactggaagatccgggaaaactccaacgagggaaccctgagcttctccgggctcaacgcccggatctcgggcgaggtcctcagcaacttcgccctcaaccagatctacggcgagcacatcaagaaggcccacctggagggggacttccacatccacgacctgtcctatccgattgtcggctactgcgccggctggtcgctcgaaaaccttctccgtaagggcttcggccacgtccccaaccaggtccattcctccccggccaagcacctggagacggccaccctccacatggtcaactacatcgggacgatgcagggcgagttcgccggggcccaggccttctccagcgtcgacacgctgctggccccgttcgtccgggccgacaagctcggcttcgggcaggtccgccaggacatccagaagctcatctacgggctgaatgtcccctcccgctggggctggcagacgccgttctccaacctgaccttcgactggaccgtcccggccgacctggctccgaaaaaggccatcgtcggcggccgggaaatggacttcacctacggcgagctccaggccgagatggacatgatcaacaaggcttttctcgagctcatggtcgacggcgaccaccagggccgggttttcaccttccccatcccgacgtacaacctgactcgggatttcaactgggacacccccaacgccaggctgctgttcgacgtgacggccaagtacggcattccctatttccagaattacatcgggacggacatgaatcccggggacatccgggcgatgtgctgccgcctcaatctcgaccagcgcgagctcatgcgccggccgggcaacatgtggggaccgggcgactcgaccggatcgatcggcgtcgtcacgatcaacctcaaccgcatcggctacgtcagcaagacgcccgaggagtacaaggcccgccttcgcgagctcatggacatggccaaggagtcgctcgaggtcaagcgcgaaatcgtcaacagcatgctcaagcgcggcatcatgccgtacacgaaggtctacctcggccatttcaacaaccacttctccacgatcggcgtctgcggcatgcacgagtcctgcctcaacctgctcggaaagggcatcggctcgccggaaggacggacgttcgccgtcgagatcctcgactatatgcgcgatgttttgaaggaataccagaacgaaaccgggaacctgtacaacctggaagccacgccggccgaatccacgtcctaccgcctggcccgcctcgacaagcagaagttcccccaaatcgtcacctcgggcacggacaagcacccgtacttgaccaattccacccagctcaatgtcgacgcgacccgggacgtgttcgaagccctccggcaccaggagacgcttcagacgctgtacacgggggggacgatcttccacacgttccttcccgaggccatcgacggggagacctgccgcaagctcgtccggaagatctccgcgacccggatcccgtatttcagcatcaccccgacgttcagcgtctgtgagaaccacggctatctcaagggggcgcatccctcctgccctgattgcgggaccgagaccgaggtcttctcccggatcgtgggctatcttcggccgatccggacctggaacgacggcaaacaggcggaattcgccgaccggacgccttacacgacgatcggctgaggaggcggaggcatggattttcttctcttcacctacccgaactgttcgaagtgcgaggatatgaaggcggctctccgggaagcggcgatcacggccgagacgcaggacgtcgccgagaaagagggccggatccggatccggacgtttcttccccggatcaagcgcgacgcccagggcgcgattatcctgccaacgctcgtctgtcgcgacggcgaccgtgtggaggcggtcctcaacacccgggaggagctcgcggcgtggttgcaatcaagggactagagaaattcgctccccgggatttccccgggcacatcgcctcgacgatcttcctcccgggctgtaccttccgctgtccctattgccataacgccgacctggtcctccgtccggaaacgctggccgacgtccccctcgatttattcatcgccttcttggacgcgcggaaaggatggctggagggtctttgcgtttcgggcggggagccgcttctccacccggaaatcgagggattgctggcggtgatcaaggagcggaacctcctggtcaagatcgacaccaatggctcgcggccggaccgtctcgagcgcctgatcgaggccggactggtggactggatcgccatggacgccaaggcgccgccggcgcggtacgccgaggtcgtccgggcgcccgtcgatccggcggccgtggcccggagcgcggaaatcgttcgggcgtccggccggcctcatgtctttcggacgaccgtcgtccccggcttggtcggcccggaggacgtccggaaaatcggcgaatggctgaacggcgccccgtcttaccggatccagtcgttttcgccggcccggacgcttgatccgtcatttgccgcggtccagccgttttcaagagaggagctggagaggatggccgagatcgcccgctcttatttcggcgaggcgacggtcgaggccctgtgagcggcgggatttacgccgccgggatatcctttaaaattcgggagaaacacgcatggaactgaaagtcaaaaaaatccacccggcggccaagttgccggtgtacggccatcccggcgacgcgggaatggatttattcgcctgtgttgataaaatcctgtctcccggcgagcttttccccgtgccgaccgggatccagatggcgattccccgcggcttcgtcggcttgatctgggacaaaagcggcgtttcgctcaagggcgtccaccggctggccggcgtcgtggacgccggattccgaggggaagtgcgggtcgtcctggtcaacttgagtcgggagccttatgagatcaaagccgggatgaaaatcgcccagatgctcatccagccggtcgttccggtcgatgtccgcgaaagcgaagcgctcgacgatacgagccgcggggaaggcggtttcgggagcaccggattgtattgacttctccgcccgccgggcatacgctttttggagcggcctgaatgattccgcggcatccggaatcggtcatccgccggacgcgaatctcacccggactcaaacctgatcggaggcctcacgtgaaaaacgaaaaatcctttgtcttccgggccgtcctttcggccggcgttcttcttctctccctttctctcatggtttgccgcggacgtcaggcgcagaccggtccggctgttgcgggcggaccgccggccggactcgccgtttcggaaatcccccagttcgtctgcgtctccaccgacgataacggcttttccggcctccccggttcgggaagcgacggcggcctgcattatctcacttcgctcttcgccgcgaggaggaatccggccggaaccggaaatcccgggagcttcgacggcgtttctccccactatacgtttttcgtcgtctccgggtacatcgcctcggaggcgggcgcccctcccgacaccttctattccggggccgatctccccgttttcgtcaagcgggcctggcgtgaggccgtcgatcagggccacgaaatcggcatccacactcactcgcacccgcacggccgccccctcaccgaagcccaatgggacgaagaaatgcggcgggcgatcgatctcctgacccgcccgtgggatccggaggaaagccccgaatatccccgtcccggatcggggctcgggctttcccgctcgaccctggccgggttccgctctccgtatcttgaatggagcgagaacggcctggccgcggcccacaaggcgggattcgcctatgattcgagtctcgaggacgggcccgccctcgggccgcatcggggccaattcgcctggccgtatcttctcgaccggcatccgggattctgggaaatgcccatcgtcgactttgtcgtcccgcccgacgaggcgtgcccccgttacggccttccggccgggcttcgggcggccttgatggaacgtcaatcctatttcgacccggagaacggcgagatcaccgggatggattggaatctctggatcgaattctcgatgacgccgaacgaatttctggccaccctgaagtactcgctcgacctccgcctcgccgggagccggagcccgatgccgctcggtttgcacagcgagctctacacggtgaaaagcggcggcgcgccggaaacggccgcgacgatcttttcacgccgggccgcgctcgaggcgttcttggactatgtcctgagcaagccggaggcgcgcctggtcagccaccgggagcttctcgactggatccggcgtcccgtccccctgcgctaaggcgaaaaagaccgcgggcgccgagaccctcgaggaaagaatccggcgcgcgcccgccgaggaaatcgagatcgttccgtatgatccgggctggccggcttaccagcccttggacgctccgccgccgcccgaccgtccgcccccgaaggagctccgcccggaggaaccgaaggagccgcgcccggaagaaaacgaccgtccgggcggcggcgggggaaggcggggcgtggagcgttccgtgaccttgcggtaatcgcagttcgggttccggcaatccgcctcgatcttcacttttcctccggccgcacgtgtcgcggcgacgagcgtcgtcgtggccgtgaccagcgtccgccgcccgcagcggggacaggcggccgccttgccgagcgtcatggcgaagctttccgaagctccgcatgagccgcactgccagacctcgtaatccatccctccggctttttcctcggccgcctcctccgccgagaggaaggcgtcatcggcctgttcgtcgagaagatccatcggccgcccgcacttggagcacggttcccggtggccggcgattttccggcggaggccctggagcgcccggccttggatgaacgagccgaccgccggagcgaggccgaacgccgccaggtaggggaggaaggacttgttcacgacggccaggacgaggccggcggcggcgctccccgtccaggccagggcggagacgttgtccgccccgcgggcggccttcatcttggccgctttcccccgtttagcggcgacccggcgggcgacgcggacgccgcccaggatcatgaacaacaggacggcggccgctccgatcagggcggagggaagaggatccggcttgaccttttttcccgccggggacggcgcccggatgtccgcggccgccggctggggcggggggggctgggccggccaagcggccggatcctcaagccccagagtcgccccggccgcggcggcggccgtttcgaccgttttccggacggccgcgtacagaccgcggccgtatcggccttcccggaaaaacgggagggcttgttcctcgagaatccggccggccaagctgtcggggaccgcctcctcaaggccgtagccgacctccagccggacttttcggtcgttccgcgaaaaaagaagaaggaggccgttttcctttccggcctcgccgattccgaatctctggaacaaccgggcggcgaaatcctccacggacaggcctccgagatcgtcgacggtgatgacggcgcattccgccccggtcttcgccttgagcgcctcacaggcggagtggatcaaggcggagtattccgggccgaggactccggcgttgtctccgacccattgatgggccgcggccaggggattcggcaccttgtcgacatcgatcgccgcgggagccggctggaggaggaggacgaggccgagcccggcggcggcgaaaatccgaagtccggcggagattcgtttcatgttcgttccctcacggcttcattttattcatcgggccggggggaagcaaagccgaggctggctcgtcgccgggcccggcctccccgatcaggcgccgccgttgacgcccggggaggccgcgcgttcgctccggccgccgaaaaattccgggccacggggcaggtagaagagaaaaacgccgagcgtcaggacggccgcgagcaggaaggggagatggatgccgacggcgtcggagaggaagcccgagaccagggcgacgagcgcgccggaaatcatctggatgttggaaacccagctgaaggcccgggtttgctcctccggccggacggtcgagccgacgaatgtgtggagcgaggggtaggtcataagcaggagaccgccgaagacgaggagggcggccacggccaatcctcgaatcggcgaccagccgatgacgacgaggcaggccgccgatccggccaaagtggtcaaaaacagctttttccgcccgaaccgccggctgagcggaccgtaggagtagccggtgatcgttccgatccccatccacaaggccagaaagagcccggtctgtcccatcgggacgccgaagcggtggttgagaagcgagggggcgaaaaagacggtcacgttccagcccatgcctccgaagaaaaagcccgggacgaagcgcttgacggcggccagggagcggacccaggactgcgcctcccggagaggccggatttcctcgtttcgcgaaggaacgccgcggagcgtcagcaggacggcgatgaggagaagcaggccgagcccggcccaggcgaagaggggagttttccatgtccagcgctgggccaggaatccgaccgtcaagtaagccagcatgaccccgacgttgcccgagccgctctggatgcccatggcccggtccagctccttgtccgaatccacggccgattttgagatccaggcgatgatcagcgggtgatagacgctcgcggccaagcggagcaaaaggaaaaaaaggagaaggacgaaaaacgagccggccaggggcgtcagggccaagcaggcgcagatgcctaagccgctggccagaaggaagattcggtagtcccggcggtaggagagccggaccacgacgaattgaaaaagcacggtggcgatcaggccgagattggagaggagcccgatctgggaataccgggtgatcagaaaaccgcggttgtagaggatgggaaaaatcgtcgggatgacgacggtggacgcgtcggtcagggcatggaagaccgaggccgagaacaggatcttttttctcatcgaagggaggcaatgtaccaaaaacggccggggcgatgcaacgcggcgcttgtcttccattcttgcgtttccggcgggattcggattcgccgcctgtttcggacgggatgcgttcggaacatccgccttcccggggcggcggccgcggatccgcgatcccgccgcggtagaggggcgatctttctcatctcgttcctcgggagattccgttctttcgccggggggatcagccggggcgtgatttcttttccgggccgctttcccccgtggacggccggcaagccgttttgatatgatcgttcctccccatgggtgccccaatgtccgccggactgttcgacgtcgccgtcatcggcggcggagtcgtcggctgcgccgttctccgggagctgtcccgctaccggctgcgcctcgtcctcctggaacggcggagcgacctggccgagggcgtgagcaagggcaacagcggcgtcatccacgccggcttcaacgtccgtccgggaagtctcaaggcccggacgaacgccgccgggctgcgggcgatctacggcctcgcctccgccctcggcgttccccacaagaaaaccggaaagctcgtcgtcgccttcgatgaggacggacgccgccatctcgaggccctccggtcccagggggagcggaacggaacgcccggcctggacatcgtcgatgcggccgcgatccggaatctcgagccggaggtccggggcgcttgggccctcttttcgtcttggaccggcgtcatttccccctatgaattcaccatcgccctggccgaaaacgcctggaggaacggggccgaggtccggcttgaaagcggtgtcacggcggccgattgccggccggatcggtttatcctcgagacgccggccggtcccgtttccgcccgctgggtggtcaactgcgccggccttcaagccgatgaagtcgccggcctggccgggccggcggatttccgcatccgacccttcaagggcgaatacctcgttttggacaaggccgccggcgatcttctccggatgcccgtctatcccgtgcctccccgggacgaatcctcgctcggcatccacctgacccccacgaccgaggggcccgtcctcctgggtccgagcggcgaaaccgccgaggacaaggacgacgcgcgctcgacccgcgggatcatggaccgcctcaaggccgaggctttccggctggttccggccctcggccggatcccggtcatccacgcgtacgccggctcgcggccgaagctcgacggcttggcgacggcggacggaccggccgatttcctggtcgccgaaagccgccggcatccccgctggatcaacctcggcggcatcgagtcgcccggcctgacggccgcccccgccctggccgaacacgtcgccggcctgatcggggcgagggaggatctgcgcccgagggaaggattcgagccgggcctgcccggccgtccgcgcttcgcccggctggacgacgcggaccgggccgcccgggccgcggccgatcccgactggggcgaaatggtctgccgctgtgaacacgtcagccgggcggaggtgcgggaggccgtcggcaatcccttcggagcacgttcgatggacgcgatcaaaagacggacgcgctgcggcatgggccgctgccaaggcgggttctgcactccccggatcatcgggattctccaggccgaagggctgaaaccggaggacatcaccaagaaaggcggatcgtcccgcctcgtcttcggaaggatcaagccgtgatccgggacgtcgacgtcgcggtcatcggaggagggccggccgggctggccgcagctctcggagcccggagggccgaggcccgggtcctccttctcgagcgggacgattgtctcggaggaatcctcaaccagtgcatccacgacggattcggactggtcttgtacaacgaatcgatctccggtccggagtacgccgagcgcctggccgaggacgcggtccgggagggaatcgtggtcgaaacgggggcgatggtcctcgacctggcggccggccggacgatgcgggtgaattcccgcggcgggtacggcctcgtccgggcgaaggccgtcgtcctggccatgggctgccgcgaacggacccgggacatgatcgagattcccggcgaccggccggccggcgtttggacggccggaacggcccagaacctcgtcaacctccgaaacctccggatcggaaacgagatcgtgatcctcggctcgggcgacatcggccttatcatggcccgccgcctgaccttcgagggcctgcgggtcaagggcgtttttgaaatcctgccgtgggccggcggactcgagcgcaacatccgccaatgtttgttcgatttttcgatccccctcgagctttcgacgacggtcatcgacatccgcgggcgggagcgcgtctcgtccgtggtcgtcgcccgggtcgatgaccgcctcaagcccttggccgggacggagcgggagatcgcctgcgacacgcttcttctttcggtcgggctcattcccgaaaacgagctgtcccggcgggccggcgtcgtcctcagcccggcgacgggaggcgcggtcgtcgatgagacgttcatgaccacggttcccgggattttttcctgcggcaacgtcctccagatccacgacgtggccgacggggcttccctcgaggggttcgaagcggggaagaatgccgcccggttcgcccggggggccgtcgcggcccgggaggctccggccgggatcgcggccggagcggggatcaagtatgtcctgccgcagatcgtccggcgcggaacggccggagccggccttcatttccgggtcgcggagccgcgccggaacgtttggatcgaggtctgcggccggtcgagcggaacgacgctgttccggagaaaatatccccgcctccttccctcggagcttcagcggatcatggtgaaaacggcgatcgaggaggaccttgaggtttcggcccatgattgaccggctgacgtgcctcctctgcccgctcggctgcgagcttgaagtcgagaccgccggcggccgtcttgaagtccgcggccaccagtgcgacaaaggactcgatttcgcctcggaggaaatccttcggccgaagcggaacttggccgcctccatccccgtggccggaacggacggccggacgaccgccgtccgtttgagcggccgcgtcccccgggagatgatcttccccgtcctggctgaaatcgcgaaactgcgtcccgccatcccggtccgccggggagacgtcctgatccgcgacgttctcggaacgggcgtcgacgtcatcgccacccggaccgttgtttgagccggcgcctttggtttgcagacgcgtctcctttttaaacagtcgaattgatctccatcctcgcaaaattaatcatgagttcttatcttctggcgggtcgatggaaccgcatctgcttggttgcgcggggctcgcgatctgatcaggacggcttcgtccgccccccgcacccgttttcctctcgactcgcgaggccggcgggccggttcaatcaatcgaaatatccggtcaagtcgtcgcggttcaagcccttttccagggcgacccgggccacggcccgggcgacgctccggtggaggccccggtcgagcggactggggacgatctcgcccgcgggcgcggcgtcggcgatcgcccgagaggccgccaggagcatgtcttcggtgatgcgggcgacggcggcgtccacggccccccgaaaaatccctggaaagcccaggacgttgttgacggccttgccgtcggcggcgaaggccgctccggccttcaaggcggcggccggatcgatttccggaaccgggttggacaacgagagaatgatctgcccgggccggatcatggccggcttgaccagcccggccgctccagtcaccgtgacgacgacgtcgcaggcggccatgatctccttgagatcggaagcggtcccgccgtatccctcgaaccggcggagggcttcgctggaaaggtccgctcccagaaccggcctccccgtcgtgaacatcagcatcttgccgatggccatcccggccgcgcccagcccgacgacgccgatgcggcggtcgtggagcggcttgcgggccgccttggccgcgttgatcagggcggcgacgaccaccgtggctgttccgtgctggtcgtcatggaggaccggaatgtcgacccggtcctggagccgggcctcgatgtcgaagcaccgcggggcggagatgtcctcgagctgaatggccgaaaacgtcggggcgatcgcggccacggtgtcgacgatatcgccgacgtccttcgtgtcgagaaggatcgggacgccggacaggccgcagaacgtctccatcaagctggccttgccctccatgaccggcatggccgcctgaggcccgatgtctcccaggccgaggacggcggtcccgtcggtgacgatggccacgaaatgacggatggacgtgaaccggcggacgagccggggatgatcccggatttggaggcagacttcggccacccccggcgtgtagacgcgccggagcacctcgaggctgtcgatcttgtaccggctgcggatggcgatcttcccgccctggtgcatctccaggacgtcgtcccggacctcgagaagctcgacgtcgggaacggatccggccgcggcgatcagcttggccatcgcctccgggccgagagcgaagacaacgatgtcccgctcgacgtgcgtcgttccttgacggaggacgcggatttctcctatgtctcccccggccgcgccgatcgccgagagcagccggccgagaactcccggctgctgccggagccggcagcggaacgtccgcatcgttttttcttcccaccacatggattcactccttgcgtcccgcggtcgatggatcaaggaaaccgggagacgaaagatatcccggacgcgggaccgccgaaccggagatgctccctttgccgccgggcgtcttccggaacgctccgtaaagatccgggatcggaaatcggagtcattatagcatataatgggaacctgaaaggacgtccgtcgaccatgaaaaacgcgcttcccgagctggccgtcgttctcgtccgtccggaaaatccggaaaatatcggcctggccgcccgggcgatgaaaaacaccggattcgccgagctccgactcgtcggtgtccggcgttttggtccggcggcgatgaaaaccgcggttcacgccggcgacatcctggccggggcccgcctgttcccgacgctcgaggaagcgacggacgatcttcacttcgtcgccgcgtccacggcgaaacggcggaagatcgaaaccatcgtggactgggacgaagccgccggacggatccgcggcctgccggcggggacccgggcgggcctcctgttcggcaacgagcggacgggcttgaccggcgcggagctgcgccgggccaacctgatcttctcgatcccccaggccgtccgccagccgtcctacaacctggccgcggccgttctcctcgcgctcttcaccctctttgacggagcccggcaagagaagcgaaccgcgccgccggccggcggcgcggacaatcgaacgcccggccttccccggcgggagcaggacgagacaatcggccggatcatcgcccagctttccgcccgcggcttcatccaccggacgaaccgggatcacgtctccgcctgggttcatgattatttcggccggacggcgatgaccgcccgggaccggggttttctcctcgccctcttcccaaacaagcgttctaccgaaaaaaaggagtcttgagatgtccgacaacgagttcaaggtcacgtttcccgggggcgtccgggtcgatgcctcccacgacgggttcacgatccgcacggaccagcccgtccgcgacgggggggagggatccgcgccttcgcccttcattctattcctggcctcgctcgcgacgtgcgccgggtattacgtgctttcattctgccgggagcggaacattccgacgtcgggcatcgagctgacgatgcggaccgagcgcgaggccaaggggaaaatgatcagcttggcgtccatcacgatcagtctccccccggatttcccggagaaatacgccggggccgtcgtcaaatcggccgagcggtgcacggtgaaagcccacctccaattcccgccggacatcgagacgaccgccgtcatccggaaggcgtgaagcctctcgtcgtcctgggtctcgacctggccggctccccccggcggccgaccgggacgtgcgtcctccgagccctcggagcggaaacggggatattgttcgacgacgcccagatcgaggccttggccgcgcgggtccgtcccgacctcatcgtcgtcgacgctccgctgaacctgccgcccggccggaggtcgtttgcggaccggaacggcgagcattatcgcccctgcgaccgggagcttcgggcccggggcattccttttttccccatcaccctcggcccgatgcggtccctgacgctgcgcggcatcgccctcaaggggaacctcgagaaacggggattccgcgtcctcgagatgtatcccggcggagcccaggatgtctgggggattccccgggcgaagcgggacgcggccggactacgccgggggctcgagcgcctcggcgcgcgcgggcttcgcccgcggatcagcgatcatgagctcgacgcggcgaccggggcgctgatcggccgcctgtttcttcaagggaaagccggagtctacggcgatttccggacgggggctatcctgatgccccgtcaacgggcgggacggcgggggccggccgccggaaaccggagctaaaaaccgaaatcctcggcgtcccgctcgttccgcttcatccgcgctttatccgcggtccggggtccgatcacccggagggccttgtggatcacattcatctcgaaggattcgcgtttttcgatcgcttccccgttgtactgggcatgcaggtcgccgccgcggatttcgatccggcggaccttgtagtgcttcaagagcttctggtagatgcccaggtagatcaggggaaagtaccagacgtaggtcagagcccggatgtcgaagaccgtgacgtcgagatagccgtcgtcgattttcgccttcggggcgatcagccaactgtacccgaaatggttggtcttgttgacgatgacgtcgaagaccttcaggtcgagatccttccgctcgaaggagacgccggcgtcgtcccggccgtcgaacagggtgatctgcatcgggtgccggggatgggtgaacaggattcgggaggcgagaagatgaccgaccagccccgggaccttggactgggaggtccggtacgtgacgagaccggtggccccgacgctgacgaagctggcgatccggccgccgatgtcgattacgtccacgacgcggggcgttccgtaccggatcgcccggaccgcgttcttgaggctgagggagagctgaagagagcggctcagggcgtttccgctgccgaagggaatgatccccaggatgacgtccttttgacggccggcgttgaagattccctgcatcgcgtcggccaccgttccatcgcccccgagggcgatcagaacgtcgttttccaggctcaatcggcgggccgtttcgatcatctcgaccttggtccccgcccggtcgtaaaccctcccgccgaaaacgcgatggatatacgcccgggccttgggatcttttccccaccggcccttggccgatttcggattgacgaggacggccacccgtttgtcgtcgaggagagaagcttttttgggcggcatcggcggcgtctcgatatctttcgcctgaagcgtattactaacattccggcgggggattgtcaaaatctgctataatccgtctcttgaggtttaaaccatgaacaacataacgatggtcggtctgctttctctctgtctccttggatgcggttgtctctccacgaccggaccggtgtacgaagaggccgcccttgagatgaaagcccgggacattcatgcccggatcctcagcgtggacacgcattgcgacacgcccggcaacatgcttgatccggcctgggacatcgggacgcgccatgagcccggctcggagaacagcggccagatcgatctgccccggatgaaggagggtggactggacgcccttttcttcggcgttttcaccggtcagggccccctgacgcccgaggggtacgctacggcccggagccgggcggcggctcagatcgacgccgtcgaggccatgacggcgaagcatcacgccttggtcgagaaagcgacgactccggccgacgccgcgcggctcaagaaagaaggcaagcgggcggcgttcatcggcttggaaaacggctatccgatcggggatgacctctcgtttgtcgagacgtacgcccgccgcggtgtccgctatatcaccctctgccactccgccgacaaccaaatctgcgacagcagcatggagcgggcggatccggaggaccggggcctttcggaattcgggaaaaaggtcgtggccgaatgcaaccggctgggcgtcatgatcgacgtgtcgcacctgtcggaccggtccttcgccgaagtcctgaatctctcgaatgccccggtcatcgccacccattcctgctgccgggctctctgcggcagcccccgcaacctcaccgatgacatgatccgggccttggccgaaaaaggcggcgttctccaggtttgctttgtctcgagctttctcgtcgatccgccgccccatccggaacgggatgcggcgttcgccgccctggacgccaagtacgggtcttgggcggatatgacgccggaccagcggacggcggcggccgccgaattccgggcgctgcggcgcaaataccccgagccgccggcccggttgaaggatgtcgtcgatcatattgatcatgccgtcaaactggcggggatcgatcacgtcgggatcggaacggatttcgacggaggcggagaggtcgaggactgccaagacgtaagccgaatgtatcgggtgacgatggaactcctgcggcgcggttattccgaggaccaaatcgcgaagatctggggcgggaacgcgtttcgggttcttcagaaagtcatcgacgcgaccggctcctcgtctttgtaaaaataatttacaacgtgagccgggaaaacccggttttaggatttgtatagcctgttttccctctcattatcttcgagaggaaggcgttggcataaagattgctctatcatgagaggttgttttgcggcggaaacaggcttggactataatgatttttagcggaatgaaatcccgaattatcacccggatcgctctctccgggatcctcctcagcctgttcctttccgcctctccctcgggtcgagacgtctatcaaccgcctgatccccagggggatacgtttcgcatccgcaacttcgacaccgccttcctgccccggttcgatccggccaagggggaatcggttttcgtcacccaacagatcttcgacgggcttgtccggctggacaacgacctcaatatcgtcccggatttagccgagtactgggatatttccgagggaggacggtgctacaccttttatctacgcaagggcgtgcggttccatgacggccgcgagctgacggcgggcgacgtcgagttttccctcctgcggttgatgaaccctgaaaccgaatcgccgttcgggcggttcttcgtcgataaggtcgtcggaggcgaggccttcgccgccggcgcggcggaagacgtcgcgggcttcaggatcctggatcggtacatcttcgagctgcactggaaaaagccgtacgtttcggctttggggcttttaagcatgagcttctgccgcatcctgcccagggaaaccgtcgaaaaggacggctcccggtttttcgcccgcccggtcgggaccggaccgttcaaattcgacggctggatccgcagcccccgcctggacatcgtcggcgtccggcttgcccgcaatccctcctatttcggccgactgccccgtgtcgcgatggtcgaatacagcccgtactacacccgcgaccattttgaaaaaagggaaatcgacgtgatgccgttttcggccgacttggcccgcttgggctgccgggtcgtcgaaggcggcgacctgaatgtctatcacctgatgatgagttgcgccaatccgcccttcgaccggacccggatccggcgggcgatgtccctcattatcgaccgggaacggctcgcccaagcccaatcctcaggggccgtccgtttccgggccagccatagtttcatccccgacaagctgccgggatttctcccctccatcaatccggtcggaccggctcccgacgaagcgtaccggattctcgaggaggagggctatttccacacgaaggagtttccggagatcctcctgtatatgccggccggcgggaaaatcgaccggacgccctttgtccgggagctgacccggcagtttgaaaccgcgggaatccgcctgaaagcccgggattactggaagctggccgatctggcggacgtccgcaagccgtttttcgtcctttgccaatccagcctggctttcccggatccggaaagcgtcatccggccgctgttcggccggtcctctcccgcccgctggctgacggccggcgttcccggccccgaattcgacgctctcctcgaggaggcggccgtcgaacccggccgggcccggtatcaggacctcttccgggaaatggagcggatgatccggcgggatgttcccgggatcccgctgtttgcggcggtccagaggctggccgtccaacccaacatccggggattgaggattccgctccttggaactacctatctcgatctgcgcgacgtcgccttcatccgatgagaaagccgagatgaaatttcgcttcactcttcagcggcggttgtttctttggttcactctcctcttcgtcgtcttgaccggggccatcctcttcgtcattgaaaagaaagaggtcgcgactatttacgaggaatcgacgaacaaggccgtcttgatcgcccgccatacggccgaccggaatctccagtccatcctcacctgggacatggatcgtttgcagcgcgatgccgaccgccgccgggcggatgcgccgctctacgtggttttttacgaccgttacgccacgccgctggtcaccagttccctgatcgccggccggccggaccttttccaaggcagtctcctccgggagcggatcgatcccgaggacttcatcgtgaagtcccgggacatcgttctcttcggccgccgcctgaggattcttgaggtcgaagtcccgattttcgccgaaggatctccggacaagtggggttcggtcaaaatcggcttgtcgctcgaggagatgcgggctgcggtcctccggacgaggcggacgctgattctgatcgggttgaccggattgttcctggggcttgcgggaacgacgcttctggcccgccggatcgtccatcctctccgccggctcgttgaggggacggtccggatttcccggggggaattcggccaccggatccggcaccggccgggcgacgaaatcggcgacctggcggcctcgttcaacgagatgaccgagaggctgctggcctcccgccgggaaaccgaggaagcccagcgcctcttggtccaatccgagaagctggcccagatcggccgcctggccgcttcgatcgcccacgaaatccgcaaccctctgacctcggtcaagctcaacatccagaaagtccttgaagacgacgccttcccggaagccgaccgggagcaccttgccctcagcggggaggggatcgcccagatcgagaaattcatcaaggagatgctgaacttcacccgggcgaccgagcttcagaaggctcccttccccgtcgaacaaatcgtggatgaatcgctgaaaatgatggccgacctgctgagggagaggaacatcaccgttgagaagaggctggctgccggcttgccggagatcgtcgtcgacggcgatcgcgtccgccaggttcttctcaacctcctccgcaacgcggccgaagccgtcggaccgggaggccggatcgttctttcggccgagggcgccggcggccggcgcggccgcaaactccggatttgcatttccgacaacggccgggggattcccgagaaggactgggagaacattttcgagccgtttttcacgaccaagtccttgggcatcggcttgggcctgtccaacgcccgcaagctggtcgagcttcaccgaggaaagatccgcgtcatccgcgggaaccaacccgggacgacgttcgaaatcataattccgatcgggagagaatcatgaaatccatcctgatcatcgacgacgatgccttgatccggaaaaccctcatcactcatctgaaccgccgggggtgcgagacgcgggcggtcgaggacggggaaagcggcctggaggccttcttcgccgggaatcccgaccttgtccttttggacgtccggttgcccgatttggacggcttggaggttctgcgccggatccgggacaaatccccgagggcggtggtggtcgtcatgaccgccttcgacgatatgaagaccacggtcgaggcggtcaagggcggagctttcgagtacctggtcaaacccctggatttcgtcgccctcgacctgacgatcgacaaggcgttcaaggtcaaggccctcgaggaaaagatcgactacctcgtttcggaaaagcagaaagaatatttgatcgacaacatcatcggcagctcgccgggaatgcgggacgtcttcaagctgatcggctcggtcgccgggacccgggccaacgtcctgatccagggcgaaagcggaacaggcaaggagctggtcgccaaggcgatccattacaacagcccctggcgggaggaacccttcatcgtcatcaactgctcggccatccaagacacgcttctcgaaagcgagcttttcgggcatgtcaagggggctttcaccgacgcggtgaacgaaaccaaggggaaattcgaaatcgccggcaaggggacgttgtttttggatgagatcggcgatgtttcgtccaacctccagtccaagctcctccgggtcatcgaaacccgtgatttcatgaaagtgggcggggaaaagacgatgaagaccgacgcccggatcatcgccgcgaccaaccagaacctccgggctcaaatcgacagcgggaggttccgggaggatctctattaccgcctcaaggtcgttgaaatcaagatcccggctcttcgcgagcgaaccgaggacatcccggacctcgtcgcctatcttttggaaaaaaccaaccgggagctccggaaaaacgtccgcaaaattccgcccgaagtgatggccgcccttcaggagaactcgtggcgggggaacgtccgggagttggaaaacgccctgatccgggccgtgatcctggccaagggagacgtaattcttctcgaaaaccttcccctggaatcggaggagaagaaaccctgcgcccgggaactcgtgcctctggacgaggtggaaaaggagtatattcaatacgttctgaccgcggtcaagggatcaaaaatccgggccagcgagatcctcgggatcagccggccgaccttggacaagaaaatcaaggactaccagctgacgacctgaccggaatttttcttatgaataatcccggctagacgtccgctccgatcctcgtctctttactttttttaaagaacccttacgccaaaaaagatcccggcggtatttccgcctggctttcggaacatcagttggcacaaatcatgcagtaattaccgcgtatcgttcaaaggatggtaataatggccgcaaaaaaaatcgtgatcgtggatgacgaagagtccatccgcaagacgtttttccttattctcaacaaatcctaccgggtgtacttggccaaggatggagcggaagctcaatcccgtttcaaaagcacctccattgacttgatgatcgccgattaccgccttcccgacatgaacggaatcgagctcgttgaatcgctgcgccggaacggatatggaggagaagtcatcttgatttcggcctatgccgacttgatcgaacccgaggtcctcgcgcgtctccggatcagtcatttcttcgccaagcccttggatctcaacgctttgaaccggtcgatcgattatcttctcaggaaagacgaatacgcctccggccggccgatgtaaataagcttataacgataataaagtttacgttcgtaaagaatttttacgggaaataattacgggcaaaggaattttcagccctttttaggtaaatcaagcttaaaacggcattggcatgattcctgcataataaaagacaggcacctataccgtgccttcccaatatccttcaactctcttcctttcagtggggaggcggaagacacccaatcttccgcctcttttttttagagcgagagttggtatttcccggagctttccatagaataagcacgtgggcatgcttctccgcggtttcatccttctgcttctcttcagcgggtttctcctccttgaacggcggcggctggcgcggctccgcgcccgagtccccctgcggatctgcgtgaccggaacccggggaaaatcagccgtcacccgccaggtggcagccgccctccgcgcctcgggccgcgccgtcttggctaaaacgacaggttcgaagcccgttctgatttttcccgacggccgtgaacgggaaatcgatcgtcccggtccggcttccgtcctggagcaaaagagggtgttggctttggccgcccggctgggggtcgacgccttggtcgccgagatgatgagcatccggccggaatgcctggccgtcgaatccggcttgatccttcgtcccggcctcctcgccgtaacgaacgtccgcctcgatcatgagaaggaaatgggccggaccagagaggaaatcgctgaatcgctggcggccgccattcccggcggggggacggtcctggttccggagggggaggtcttcccggcgttcgcccggaccgcccggagaaaaaacgcccggcttgtttccgtcccccaaggcgaagaggacggtccgcttcctctggtggattttccggagaacgtccgattgtccctggccgtggccgagcgcgccgggatcgaccgccggacggcctcaaggggaatcgcctcggccgaacccgatttcggcgatcttcgggcctggtcgatggtctcgcccgcctccggccgaacatggcatttcgtttcgattttcgcggccaatgagccggagtcgacccggattgccctggaacgggcgcgacgccgcgtccccttcgagggacggcgggtgatcgccctgctgaatctccgggccgaccgcgcttcccggacgcgacggtggctcgaggcgatctggaacgggtttttcgccgggttcgaccgggtcgtcttcatcggcgagcaggccccggctctcggccgcctgaagtttccccgatcggagggaattcccgccgcgggcgtcctggccggccggtctccggcgaaggtgaccgccgccctttggccgttgtgggccggcgaggccgtcgtcgtgggcgcgggaaacatcgccggcctcggcggcgctctggtcgaatactgggacgccgcgggaacgagggtcccatgttgacgacgatgctgatcggcctgttcgtcgccctcgtcacggccgaagtcacgggggtggtccccggcggcctcatcgtcccggcctacctggctctctatctcaaccagcccggccggatcgcggcgaccttggccgccgctttcctcgccctcggcctcttccgggcgtcggcccggtatgtccttctcttcggccgccggcggttcgtctttctcctcctggcgggcgccctgatcgggcaggcctggttcttgatttggccgtcgctgcttccggcttccctggacctgcgggtgatcggctgggtcattcccggcatcctggccaacaacctcgcccggcaaaaaatgattcggacgctggccgccctggccgcggcgacggtcgcgacctgggcccttgccgaggtcatcgcccttttctgaccggaccatgaggaacgaggcgcggcccgaatcgtcgccggggaaagaaatgaaatcccgccggacgcgggcgggcgttttggttgggctcggcctctggagcttggctttcggggcgtttttttattttctgccccctctccccgcgccggggacggacgaggaagcccgccgggcggccgccttgatggcccgggcgatcgccgccctccgggaatgccgggagtcgtccggcccgccgatcgatcctctctccgacatcaaccggacgggcttgattggccgggaggatacgtcgatcacgacgtcccccggacggcttgaagccaagcggacgacggcgaatcctctcgtcgccggggccctcgtccggatgttccgggaagcgggcgccggacggggggatgtggccgccgtcggcgcctcggggtcgttcccgggcttgattttggcgaccctctgcgcggccgcggcccggggaatcgaaccgcgcttgatcgtttccctgggcgcgtcccgctggggagccaacgatcccggctggacctggctcgagatgtccgattgcctgcgccgcgcgggcgtcctggacgtcgagtcggcggccctgtccctcggcggcgggcgggacggcggaggaggattgtccgaaagcgggcgcgttcttctggagaaaaaaatcgaggagacgggcctgcccttcatccaggagccggaccttcctaaaaacgtggccgagcggatcgccttgttcgaacaaagcgccggcgggcggccgatccgggtgttcgtcaacatcggggggagcttcgccgacatggggacggacggggaagtcctcaagctccggccgggcttcaaccgggccgaggagatcttcgttcctccgccggatcggcggggcgtggtccaggagatggcccggcgggggattccggtgattcatctcctcttcgtccaagggctggccgagcggtacggccttccctgggatcccgttccgcttcccggcgccgaggacggcggatcccggccggcgctgtccccgccggcggggatcgctctcctctctctttacctggcgggagtcgtctttggtcttttccggatcgcccggctcagccgccgcttcggcgattaagccgtcgcctcgtttaaacgctgctcattccgtacatcgcctcgcggagcacgcgtcaagggcttttaaaaaaaatcgtcttctcgaaaaaaccgcgggaaaacggggcggagatcaggcgagcttccgtccttccatgtagaagcgcttctcccaagcctcgcccatggaaaacgtcttgcgggggagggcgccgtcgaggatgacggttttgaacaggtcggttttgcgcatgccggcgaggtagaagcccatgttcccgggcttggctccgagctcggcgacgacgtccgtgccgtggacgtaatcgatttcccgggcgcccttgtctttgaggaaaacgtccaggaagttctggagcgtcccgaccggaaggttcgagccggccgcttcggcttccaggactccgaatccctcgggggtgatgaggccgatgcggtgggccgggccggtctgcgaatccacggcggccttcatcatgttcaggcagcagagggattcgtaccggacgtgcccgccgtagaacgccttcatctcggcgacgaggtcccggccggccgcgacgtcgaaaagaacccggtggatgggctcgaaggccagggcgtcgtcgtggacattgaccagctcgacgatggcgtaacggagcggggagttcttgacggcggccgccccgccggccgcttccttcgtcttttcccagatggttttcgccgtggccagggagtgattgccgtcgcccatggcgtaaagcaggaccggcgtgccgtccttgaggccgtacttggcggcgaaggcccgcggctcggccagacgggtcagtccgcggacgaggttctcctccagggcccggccggcgacgcggtatccggccagatgtccggagccgagcatcagctcgaaatcatacagcttgggaagcgttcccgcggcggcggcgaccggaccgatgacctcgtcggccgggtcgtcgatgaggaccatgatatggggaagctccatgggcgcgccctcgcggatgcggacgcggggcgggatgcgctcgatgatggtcccttccgtcgcccggatcagggtcgtcgagcctttccggtaatcgtagtgctccaaatccatggcggcgaccaggcccttgcgcgtttttccgcccgtcgtccgttcgacgaagaccagcccttccgccgagttgaagaggccgcgggcgaaataatcagccatcgttttccggattcggccgatccgggcgtttttctccggttcgggttcgttcaaaaagacttcgggatagatcaggtgaagggtcgagggggcgtcgccgacgaggccggccgctttttcccaatacgccggctcggacgtgtattgatcgcaggcgatgaccgcccatttcgtcaggtcgagcccggcttgggggagaaggatttcggggatgccgagggcgatggattcgtaagcgcgcatggaaactcctggttgatgatcgatttccgcaagggaaaggggaaatcttacccgagatcggccgcgttttcaaacccccgcattgaatcaactaaaatgtaaccgaaatccctgaaagagaggacggtaacagaaggacatggagatgaaatctcgtcaacagtacccccgccggctcgctccgggccggatttcgtttttcccgatgatgggatagaatacggcttcgggagggatcctcccggaaaggaagagacccccatgactccccgccgctcgcacggccgatttcccggcctcgtcccgctcctggccgtcctcgtcttcttcgtcccggcctgcggcaaaaagacgcccgccggcaaggacgaggcgaagggaatttccgacctggtctccaaggcctcggccggccgggctgagatcgacttccaaaaggggcagctcacggtcaaaacgcccggggggagcgccgtcctcacatccgggggaggatcctggccggccgacctgccggaggacctcgccccgttccgggcgggatcgatccggaattcgacgaattcccagtcgccggagggaacgacttggacggtgacgttcgccggcgccggggcggaggacgtcgccgcttacatcgaggatttgaagggcgacggctggagccttatcatggagtcggaggtcccccagggcgcgttcacccggctggagagggagaacatggtcatccagctgactttcatgagcggggatggcgccttgatcatgaacatcctccggcggcggagcgattgagcccggccggtctccgtgaatcccgctgttttcgatgatcgccgcggccgcccgagctggccgcaaggcggagaggagtccatcatgaactaccggtatctcggacggaccggcgtccgcgtctcgcccttgtgcttcggcacgatgaccttcggcaaggaagccgacgaggcggtttccggggagttgttccgcgcctgccgcgaagccggaatcaactttttcgattgtgccgacatgtaccaggccggccgggccgaggaaatcctgggcggattgatcaaagaccaccgggacgaagtcgtcgtcacgacaaaaggatttttcccgacgggaacggatcccaacgcccagggcgcctcgcgctatcatcttcggaacgcggtcgaagccagcctccggcggctccggacggaccgcatcgacgtttatttcatccaccgcttcgacgaccggacgccgctcgaggaaacgctccgggtgctggacgatctcgtccgccaggggaaaatcctctatcccggcctgagcaatttcgccgcctggcaggccgagaaggccctggggatctcggcccttcatggctggtccgcgccggccgtcctccagccgatgtacaaccttctcaagcgccaggccgaggccgaaatcctccccatggccgaagccgaaggattgggagtgatcccctacagtccgctggccgggggttttctgagcggaaaattcggctcaaaccggcgcccgcaatccggccgtttgaccgaacacaagatttaccaggcgcggtatttcaaggaggcgaatttcgagatcgtcgaccgcttcgacgcgttcgccgaagcgcgcggcttcgacccggccgccctggccgtcgcctgggtcgcgggccatccggcggtgaccgcgccgatcgtcggggcgagaagcgtcacccagctcaagagcgtgttgggcgcgctcgagatcccgatggacggcgtcctgcgggcggagatctcggccctctcgccggccccgcctccggcgaccgaccggagcgaggagcggacggacacccatttcttcatccggacgtagcggcgatcacgcggccggacgagggaaacgagggctcacgctttcaagcgcgcgcccggcttcccaagccggcggcgttcttctccgttcttcccttcttttattgtgggaattatttcaacaaaaaaaagtctttaaaaaagaagcctattcgtttcgcgccttcttatgaaaatgaaaaagctaagaaaatgaagccgtttggatggaagttgcataaaaatgatcggtatagacagtcagggtttcattcgatatatcgcctcgaatcttgatccggaattccttagagaagtcgtgcaaagatatttgaaggaagcgtgaggtcatgaaaaaaattacgcttttagtattcatcgccgttttctcacaatatgccggttcccaggaaattcatgttcaacaaaaaaacggacttttccagaaggaagaagataaaaaaatttcttttcatcgggtagccaagttcgaaccaagcgcggaaaaccgagcctggagttcgataaccaaaataatgatcttcggcgatcgcgtgtttctccttgatggacgtcaaagcaagatcgctgtctatgacatcaacgcgaaatttcttcattccatcggccggccaggacaaggcccgggggatttggagcatccgtcggatttttttattacggataaagaagtgatttatgtcttgaattcgatggccaaaacgattgaagtctttacgatcaggggagagtttatcaagcgaattgaaatcaaaatgccgaaggaactctattattcatatcccagcatgcttcttctcggggacaacgatgaaatatacatcgcgtattccctgagtccgaatttaatcgatgcctatgatgaaaacgggagatatttgaggactctcctgaaaagagaagatgacatcatgattcccggagacaatatcggcaattgttcgcaaattcaattttgccaggataaaaaagcgattcttcattttgatttttttaaaggattattcatcaaagtcaataaaagcggagatgttgaaaataaattcagcgtttatgacaagcttcatgacaaggaaatccgcgcgatcgaggacatgatctccgagacgaggaagcaagcggcctcgagcgtttccataaaagaatttcagctttggtcgagatgctgcgtggatgacgataacaacatctatgcgttttcgttgaagaaaaaacaagccgaaagggaaagaatgtatgttttctcttccaagggggatttcctttattggcaagacgcgcccgataggatcggcgatctcatcgaagatgcttattgtttcggtgacatttttatttttaaaactcaaaatgatgatctctatttagcaaagaagggagatgaatgatacggacgaaaatgaaggtgttctttgcggcagttctggtcattcttttttccggggggatatttcttatttgagctgattgttgctggacaagcggccggatgcgctgttgcggcactatcaccggatattattcggcttcatatgaatgcgcctgcagcgggtcgagcaggacaaatcatcgtcgatattctcttgttagaagaaattcaaaaataagattcgttcagcaaagcgcctaaagctctatcccgccggatccgaatccggcgagggaggattccatcctttcccgcgatccgggcgatcacctcgcgggtgtgcggcgatgaccgcaattttccccctgtaatcgcctccaaggcggccttggttttcgtcgtcgcgtcgcgctctttccttgaaaaaaatcgcgggctcgcataggatgaggacccatgccccgctgcggacttttcggaacgatcacggccgacacgatcgaaatcgaaggcggacggacgttccggtccgtcggcgggattctttaccaggcggccgctctctgcggcctcggagtttccgtcgcgctttccgcccgcggcggcgaatcgatgcgcgcggccgtcgagaatgagacggcggactggcccggtctcgaccggaccggtctgacatatgtccccggccccggacaccgcgtccgcctccgatatccggcgggggagggggagagggaggaaattctcgaatcggccgttccgccgctcgatcccggcccggcgctcgaggccctccccgggttggattttctgatgatggtcttcaattccggtttcgacatcacgcccgacggctggcacgccgtcgccgggcgggcgtcgtgtcccgtctggatggacatccattccttagtcttggagccgcgcgtcggatccccccgcggctaccgggccgtccccgattgggaggcgtgggtcgagggggcggcttatcttcaagccaaccgccgggaggcggcctgcctcatgggccggccggaccgcgaggccggagaatccgaaatcgaagagctttcgcggcgggcgtttcgtctcggcgtccgggccgtgttcgtcaccctgggccgggacggcgtcgcggtttcgacgccggagggattcgtccggattccggccgcgccgtcgccggccgtcgtcgatccgacggggtgcggcgacgtcttcgccgcggccgcggccgaggccctgctaagcggacggacggtcttcgaagccgccgtagccggcgccgccctggccgcccggacggccggagtgtcgggcgtccatgagatcttcggcctcgccacccgggaacgggaaagccgccgggaccgcgatcgtccgccgcctccacccgccggcggcaaaggagagaaatgacatgatccgcgcgaagaccgcctttttccttcttgccgcggccgccctggcggccgcccttccggcctgcaggacggaaacccccgctccgcgtccgatcaccccggccgaaatcgaggcccacatccggttcctctccgacgatctgctcgagggccgggctctcggcggccgtggaatcgagatcgccgccctataccaggaacaggttttccggggtttgggtctcgagccggcgttcccggacggaagctatcgccagacgttcgaggcgcgggaatgcgctcccgatccgaagcccgctctgtccgtcaaggccggaggcgtgaacgtttccttggaatccttggaggagtttgtcgtaaattcttaccgcgaagacgcgcccttccgcgtttccggcgagctggtctacgccggctacggcatccaggctcccgaacgggactgggatgacctgaaggggatggacctggcggggaaagtcctcctggtcgagatcaatgagccgggcaacgttcccggcggccttttcgacggggaggcgatgacgtattacggccgctgggtctacaagtacgagaaagcggccgagctgggggcggccggctgtctcatcattcacgacacgaagggcgcggcctacggatgggacgtcgtccggaacgggtggtccaacgaggagtacttccttcccgataagccccagcccctgtttttccggggctggatcagcgccggggcggccgaacggatctgcgccgcggccggacgggaccggcgggccctccgggcggcggccgaaacccgggacttcgtccctgttcccctcgaggcgacggccgaagtccggcagcgatgccgctaccgttcggtttcggcctccaacgtcgccgggctgctccgcggctccgtccggggccccggggagcggttcatcgtcttttcggcccactatgaccacttgggcgtcgatccgacccgcgaaggcgaccggatttttaacggagccgtggataatggctccgcctcggcggcgatgttggccctggcccggctctgcgccgaggcgccggagaggccgcgggcgacgcttgttttcgccgccgtaaccggcgaggagaaccaattcctgggttcggattattttgtccgccatcttccctttccggccgaggcggttctggccgatctcaatttcgagatgaccggcgtctggggcgaaaccgaggacgtctatgcgatcggggcgtcccattcggacctggacgaaatcgtctcccgggcggccgcccgtatcggcctccggtacacggcggagcgggacacggagctgggctattttttccggtccgatcaattcagcttcgcccgcaacggccttccggccgcctggcttcacgaggggatcgtttcccggacgcggggagcggaatacctgccggagaagacggccgcctacaagaaaaacggctatcatcaggtcggcgatgaaatccagcctgactgggatttcgccgggacgatccagatcgccctctgggcccgggaaatcgccgcccttctcgatgcctcgcccgaccttccgcagttcaaaccggaaagctcgttcaaaagaaaacagccgcattgaccgcggacgccgccctgaggtaatataccagccacggtggcgcatggataaaagagacgtcctgggcatcagtcacttctcggattactttaaaatcaaccagcttgtcttcgagctcagagcttcggaaaaagtcgcggccgtcgaggaattgatcgacgtcctggcgaagcaaaagctcgtccggaaccggaaaatgatcctgacccggctgatggaccgggaaaccctcgagtcgacggccctgggagacggcatcgccgtgccccacgcccgggtcgattccgacggcgagatcgtcatcgccgtcggccggtcgtcggaaggcatcgatttctccgctccggacaagaagaaggtccacctgatcatcctcatcatctggaatccgaccctgccgggcctcttcaaccaccttttcgccgggctggctcatttcctccgggatccgcatttccgccggcggatcttcgaggccaaggacaagaacgccttgtgggaagccctgggcgagattgagctgcgccttccccaggaagacaagatcatcagccgggccggcctgctgcgcaagctccaggagatcgagaagaagaaaaagaaggcgacaaaagcccaactgcccaccctgaaagcccaggccgacctcctgcgggaggagctcgacgaagccctcctgacccgttttcagaagctgatggagcggtacggcttcgccgtggccgaggtcgaggacggcgtctgccagggctgcaacatcagcgtgtccacggagatgagctcggccatcgagggcagcaacgacatctacatttgtgaaaactgcggcaagtacctcgtcgccgcctcgccgaagaagaaaaaaaagtagggtgagcggacccgtccgtccggaaaagatcgccgccctccgggaaaaaatggagcggctcggactgcgcgactccgattttattgagcgcttcatgcggtcggggggaaaaggcggccaaaacgtcaacaaggtcgagacctgcgttcatctgatccatgtcccgaccggcctttcggtcaaatgccagcgcgagcgctcccaggcgatcaaccggtttctggcccggcgcatcctggtcgataaaatcgaaacgttgcggaaaggcgaagccagcgcccgggaacagcggatcgaaaagatccgccggcagaagcgcaagcggtcccagcgggccaaggcgaaaatgctggacgacaagcgccggcagggggaaaagaaagccggccggtccttccgtcccgatcccgacgtgttttaagaggccagccgcaggagggcggccagcaggaggttcgcccccttttccagatcctcccagcggagggattcttccggcgcgtggctgaggccgtcgggactcgggatgaaaatcatggccgcgtccgtcaccgtgccgagaatctgggcgtcgtggccggcgccgctcgtgaccggcatatgggcgtagccgagacggtcggcttccgccgccaggatcccggccaggcggccggggatgcggtacgggtccgtccggtccatcaggcgcgaggcgaatctcaaacggcgggccgaggccacctcgccggcgatcccgagcagctcccgttccagggcttccatggattccttggaggagcttcggaattccagggaaaaatccgcccggcgggggatggagctgaaggtgcccggctggatgagggcccttccgatggtgacgaagcttccataatgggccgaggcgacgtgccgcgtcgcccgcagggcgaagtcggccagcccgaggagggcgtcgcgccgcaattccaggggaacggttccggagtgtcccgattccccctcgaaggcgcaccaccggtaatgctttccgttgatggtctcgacgagacccagcgagatcccttccgtttccaggaccggcccctgttcgatatggagttcgagatacgccgcgacggccggcgcctggcccgcggccgagaggatcgtctcgatggtgtacggcgtggccgcgagaatgtcggccaggggcgggccgaaagaagtcgttccgcgctcgaggagctcccggtccaattttccggtgaacgcccggctgccgaggaaatcgccgaccaggttgccctcctcgtcggtgaacgaggccgcctcgaggggcaggcggaggcgcagaccttcctcccggatcgtccggaggcattccagggcggcgacgacgccggccgctccgtcgaacatgccgccgttgggaacggtgtcgagatgggagccggccatcacgacgctggcctccggcccggacgccccctccagccggccgaactggtttccggctccgtcttcccggtactccaacccggcttcctcgatccgggaccggagccagacccgggcttcgagatcggcccggctgaaggacggccgcgtgattcctccggcggcgtcgcggccgatccggccgagggcctcaagatccgattgcaggcgggacgcgttgatgcggatgatcatggcgggcctcctcccgcgccttccggggccgggcgccgtcctccgtcgagggaagagataccggcgggcctaccgggcgcgccggggattcaacaaggcgaccatgtcccggacggcccggtcgacgccgacgatcgccgcccgggcgacgatcgaaaacccgatggaaagctcggtcatttcggggatggcggcgatcggaccgacattgtgataatcgagcccgtggccgccggtgacgtccaggccgagccgggcggccgcggacgaggccgcccggatttcgtcgagggctttctcccgggcttggccgggcgcggcctcggcgtaaactccggtatggatctcgattttccggacgccgagatcggcgatcgcccggatttgggcgggggacggatcaacgaaaatcgaaaccttgattccgcccttggtcaggtcccggatgtgggcggcgagcgctttgcggcggccgacgacgtccagccctccggtggtcgtcagctcctcgggcttttccggaacgaggcagacgacgtcggggcggacggcgagggccgcggctttcatctcggcggaggcggccatctcgacggtgagcttcgtcttgatcgcctcccgcagcatccggaggtcgcgctcgttgatgtggcgacggtcgccgcggagatgggcggtgatcccggccgcgccggcctgctcggcgatcaaggcggccaggacgggctcgggttcggccgcccgccgggcctggcgcaggctggcgaaatgatcgacgttgaaggacagcttcatgaggaactcctcccggaaaagatccttccttccggcgcgttccgattataccccaaagggatcgtccggcgcagggccggccgcggcctcaggccccgatcgttttgcggatcgcggccgtgatccgggcggccaggatctcgatcaggtcctcgtcctcgccctcgaccatgacccgggccaacggctcggtcccggaatagcggacttccagacgcccgttgttccccaggcgctcccggacgtcggcgatcgccgcggcgacttcggcaagcccgtccatggccggcttccgggccacccggacgtttttcaggacctgcggatattccgcataatcccgggttagatcagccaaggggagattcttttcgaccatgatctcgagcatcttgagggccgtcaacaggccgtcgccggtggggcattcgtccgagagaatcgtatggcccgaacgctcccctcccaggttggcccggatcgagagcattttttccaggacgtatttgtctcccacccgcgtccggaccagggagagcccgtcggcggccagggctttctccaggcccatgttactcatggtcgtggccacgaccgcctgtccgcggaggaggccgcgggccgtcatcgcccggctgaggacgaacagcgtgtgatcgccgctgaggatccggcctcgatgatcgacccagagggcccggtcggcgtcgccgtcgaaggcgatgcctaagtccgccttccgggacagcaccgtctgggcgagtttttcaggatggagcgccccgcaatcctcgttgatgttccggccgtccggctccgcctcggtcgcgacgatcgtgaagccgagcccgccgaacacctccggggcgatggccgaggccgagccgttggcgcaatccaggacgattttcatccccttggggccgggacccggggcgaaccggcggcggaggaaatgctcatattcccggcgatagaccgggtccggccggacgtccgttttttccaatccccggacttccggccggcgggcgatttcagcttccaagcgttcttcccaggcgtccgagatcttcaggccggcgctcgaaaaaatcttgatcccattgtccttgtagggattgtgggaggcggaaacgacgatcccggccgagaacgcgaacgtgcgggcgagatgggaaacagccgacgtcggaatgattccggcggaggcgcaccgccccccggccgaggcgatgccccggatcagggcctcctcgatccaatcgccggattcccgggtgtcccgtccgatcaggatccggggaggcaggccttcctcttggaggaggtcgaccagggcgcggcccagcgtccggatcgaaggtttgtccaggggatattctccggccgcggcccggatgccatcggttccgaacagcttttccattttcttcttttccccccttcccgccgccggattatttttcgatgagggtgatccggaccgaggcccgcgtctgagccgtggcgaacctcaactcgggccgggggaggatcaagtcgacctcaaaggttttcggctggtccaacccggtgatgtccatggggctggtccggatccgatcctggggcttgatcatgctttccgggccccggacgaagaccttggacgggaggagatcgacttggtcgaccttaagcccggtcttgggctggccgacgaggaccggttggatctccatcaggacttccgcgctccgctcgatcttgagatggactttattgggaaaaacccggacaaccttggctccggccgggacggtcacgatatcgggattcagcgggtaatcctcttggttgacgttcgcccggctcaggttgagaacggcttggacgtcggccgaggtcatctgtccgagcatccggttcgtcgcccggacggtcacgtcgatcatcaacggcggccgctcggtcatctcgaactcggccgaaaggccctggggctcgagccggacctggaacgtcttttcggaaacgattttctcctccggcatcagggtgatccagaggaacacggccgtgaggaacgccaggagcttgagaagtccgttgcgaaggaatagatcccggatctttttcatcattttttcaggtattccaggagccggtcttccagcttgttccggtcgatgaggcgttcgagggttccgcgcgtggccagcgagattccgcccgattcctccgagacgatgacgaccgccgcgtcggtttcctgggtcagtccgatggccgccaggtgacgggttcgggtcgggtaggaaatccgcatttcatgggtggccggaagcgggagaaggcatccggcggccatgatcttgtcgccccggatgatcaccgccccgtcgtgcaggggcgaatgagggaaaaacaagctgaccaggagatccttggtcagcacggcgtcgatgggcgtgccccgctcggcgaagggctcaaggctgacctcgttctcgaccgcgatcaaagccccgatcttgcggtcggccatgtaatcgacggccaggcagaggtcctcgattttttcctcaaacgagcggagagccaggggcttgcggaacgaccgcgagccgatgcgcgtcaggaaccttcggatctcggtctggaagaggacgatgacggcgatgatgatataggtgacgaagttgcggatgagccagttggcgacgaacaggttggcccagcgggtgatgaggtaaagcaggccgatcaatccgagcccggcggccatggggtaggctttggattccttgatcaggacgaaaaaggagtaaatgatgatcgagacgacgaggatgtcgatgaaatcgaccagcttgaagaggtgaagggcggtcaggatgttatcgagcacggccggcctcccgcgtctcgggattctcccggccgggcgggccggacaagatggcgtcggccacccgggccgcccgccgggtggattggacgtcgtggacccgaaggatgtgggccccgcgggccaggccgacgacggccgcggccagcgatccctccaggcgctcttccggaggaacgtccagaatcttcccgatcatcgacttccgggacacgcccatcaccaccggccggccgagaccggcgatcgtttccaattcccggatcaaggcgcaattgtcctcgagctgtttgccgaatccgatgcccggatcgacggccaggctctccttgttcaagccgtaggcggcggcgatttcgatcttttcagccaggaagtcccggacctcggccacgacgtcgtcgtagcgcggggcggcctgcatggttttcgggacgccttgcatgtgcatcaggatgaatcccgcgccggtttccgcggccaggaccagcagccgggggtccatctcaaaggagctgatgtcgttgatgacgtccgctccggcctccaaagccgcccgggccgtctcgaacttggtcgtatcgaccgagagaaggacccgcgtttgggctcgcagcgaggaaatcaccggaacgacgcgccggatctcctcctcggccggaatgggatcggagccggggcgggagctttcccccccgacgtcgatgatgtcggcgccctcgtcggccagtcgcaggccgtggtcgacggcccgtccgggatcgaaatagcgcccgccgtcgaaaaaggagtcgggcgtgacgttgagaatccccatcacccaggtccgcgcccccaggaggtgaggcgcgcccttgacgcggaagacggttccggccctcacttcacctcgcggttcccggccggttccggtgattgtccctcctcttcggatgatgggggaggggaggaggccggtttgcccaaaatcgcgttaatttcgtccgacgacaggacttcccgctcgaggagctgcttgacgatggcttccagcagatcccggtgttcgccgatgatcttctcggcccggccgtaattgcgctggacgatcttcttgacttcctcgtcgatcgcctcggcggttttctcgctgtagttcttgtgggcggtcagctcgcggccgagaaaaatcaggtcgtcccgctcgccgaaagtcagcgggccgaggtcgctcatgccccactggcagaccatccgccgggcgatttccgtggcccgctcgaaatcattggccgcgccggtcgtgatctggttgaggaacatgagctccgtgacccggccggccatcagcacggccagttgggattcgagataggctttcccgtacgtgtagcggtcgtcgagggggagctgctgggtcaggccgagggccatcccccgggggatgatggtcaccttgtggatcgggtcggcctcggggatcatggccgcgaccagggcgtgcccggcttcgtgataggccgtgctttttttctcctcgtcgctgatgatcatgcttttccgctcgacgcccatgaggaccttgtccttggcgtattcgaggtccttcatcctgaccttgtcctgctccaggcgggccccgttgagagcggcttcgttgatcatgttggccaggtcggccccgctgaaaccgggggtcgagcgggcgatgaccttgaggtcggcgtcgtcggccagcggaatttttcgggtgtggaccttgaggatttcctcgcggcctttgacgtcgggcatgttgacgacgatccgccggtcgaagcggcccggccggagaagggcgctgtcgaggatatcgggacggttagtcgcggcgatgaggatgatgccctcgttggagtcgaagccgtccatttcgacgagcagctggttgagagtctgttcgcgctcgtcgtgccccccgcccagcccggccccgcgctggcggccgacggcgtcgatttcgtcgatgaagatgaggcagggggcgtgcttcttgccgttttcgaataagtcccggacccgcgaggccccgacgccgacgaacatctcgacgaaatcggacccgctgatggagaagaagggaacctcggcttcgccggcgatcgcccgggccaagagcgtcttgcccgtgcccggggcgccgacgaggagaacccccttggggatccgcccgccgagcttctggtatttctgcggctccttgaggaatccgacgatttccttgagctcctccttggcctcctcgacgccggccacgtccttgaacgtcactttcttctggacggtcgagaagagcttggcccggcttttgccgaaggacatggccttgttgccgccggcctgcatctgccgcatgaaaaagaaccagaagacgacgatcagcacgagcggcgaccaggtgaacaggaccgacagccaggtcgcccggttggcgtccttgacggtgatgtcgactttgttctggcggaggacgggaacgaggccgtcgtattgcgaggggatgatcgtcttgaacgccgttccgtcgctccgatagcgcccggtgacgttgacgccgtcgatcgtgactttctcgacgcgctgggcttcgacgtcgtcgatgaaccggctgaacgggatgtcggcgctggacatctcccgcgcttggaaaacgctccacaggatgatgacgagaatccccgccaccagccaaaacagcatattcttcagggattgattacgtttaacggccatggaccttcctttgggcgcctcattttaacacggatcagggaaggtgaaaaggaggaattgcgtcgcggcgttcttgcgggcgacccgggtctcgtttcgggagccgatgatccccctggccggcctggagaatcaattcgaaaagatccatatgggctccgctttggaggtgaaggatgaaaacctccgccggctcttccggcaaatggcccgggacgaccgggagcatcgaatcgtcctggaggaaatccttcagccgccggtttgagaaggaatcggcgcggcggccgcggctcggaagccgaggcctcgaatttagcccgaaacggcggaagaaagagctttcggaagcggaaagtccgcttgacgatcgccgccttttggcgtatgatctgaccccttcccgtggggctgtagctcagttgggagagcgcttgaatggcattcaagaggtcgccagttcgatcctggtcagctccaccagcgccgctccttttcctgttcttggttgcttctcccttcgtttcaaccgttgaggcggtcctctcctcggacggcggccgtcaagacgcgccggccggcccggcctcctggagccgcttggaaaaagaggattttctgcggacggccgggatcgtcggcagggtcggcgtcctgggaggcgtcaccaagtccgtccggattacgttggggaacgagcgggggacgcacgacgcccacgtccagacgatcgaccaggcggcggcgaagttcgagggccagggcggccaatgggagctcaatttccgggatacctataaattcaacgtcgccgcctacctcctcgaccggatgctcgacctgaacatggttccggtgacggtcgaaaggatcgtggacgggaaaccgtccgccgtcacctggtggatcgacgacgtcctgatggatgagaaggagcgcctggccaagaacgtgactccgccccggtgggcccgtcccaattggaaccggcagatcaacatcctgctggttttcgatcagctcatcgccaaccgggaccgcaacctggggaacatcatcatcacgaagaattggacggtttggctgatcgaccacacccgggcgttccgcatgtacaaggagttgatcgagcccggaaatctcacggcctgcgaccgggctcttctggccgatctccgccggctggaccgggcctcgcttgagaaagagttgggcggcttcctcgccggcatggagatcgacgggcttttggcccggcgggaccggatcgtggaacttttcgacggcaagatcgcccgcgagggggaggacgccgtcctgtttgactacttgatcgcccgccggccgcggcgctgagggcgtcccggcctccgccggagacggttgtcgccgttttcggacggaccgccgcccgggatcaccctgaggaccaggcgtccgcgtccttggtatgaatcttgcacaatggattttggagcgcgggctgcgcccgcattcttgacttggctgcgccgggacggtaggataggagaggttgtgaccgcctgaatcgagaaaggatgcgagcatgaaaaaagccgccgttttcctcagtctttcgattttcctggcttccctttttgtttttatcgccgatgcccaggccggcgtccaggggacgatcaagggcgtcgtcaaggacaaaaaagggaatgttgtcgagggcgttaagatcacaatcgtctccctccagtattcggccgtgaaatacaccctcaagaccaacgccaagggcgaatacttccagatcgggcttcagccggattactaccaggtcaaggcggagaaagacggctttttcccgatcttcgtcgaaaagcaggtgaggatccaggacgtgctcgaggttaatctcgagctggaggaaggcaattattacgtcgggggggagtcgcccggcgagaaggatttcaagcaggggaacgagctgttccaggccggcaagtacgaggaagcgatcgccgcttacgaggccgccatcggcaaggaagccggcgagcccacctatctcaacaacctcggaacgacttacatgaagatcgggaacaacgagaaagccatcgcgaccttcacgaaaatgctggaaatccagccggaaagctacagcgccaacaaaaatctaggttcgctcttcggcgaggccaaggactatcagggcgccctgccctattacgccaaggcctcggagctctccccgaatgatccggatgctttctacaatctcggggcctgttacttgaacctccaggaatacgacaaggccgaggcggccttcctcaaggtgaaggagctgacgccggattacgctccggcttactaccagttgggaatgatctacgtcaatcagaataaaaagcccgaagccgtcgaaaacctggaacggtacatcgagctggctcccgacgagcccaacgcggatatcgccaggagaattctggcctatttgaaataaacccggaaccaagtccgggcggacgctccggcggaccgaagcggacgatcctccgccgcaacgaaacgggcgaacgagaagtttgggaggtcggacgatgatgaagaacacccgcggaaggagactgccggcgatgctcgccgtcctggcgttcggcctctccggagcggccttcgggcaggatccgtcggcccaggtccccaagacgccggaaaagaaaaaagaagagccggccggcaagatgccggaacgatacgagaagtggctcaacgaggaagtcatctacatcatctcccagaacgagcgcgacgttttcaaatccctgaagacggacgaacaccgggagggcttcatcaagacgttctggaaaaggcgcgacccgaccccagacacccccgtcaatgaattccgggaggagcattaccggcggatcgcgtatgccaacaagacgtattttgaagggaaagccggctggcggaccgaccggggaagggtctatatcatgttcggcccccccgatttcttcgagacgaatcccggcggcggccgtggtttcctgctgggcgtgaacgccccgacggccgaatttccggccgaggtctggacataccgggagatccccggattgaaggagcggatcggccgggtggatttcaccttcgtcaattactacagcgcgggatcctggcagctcacctccaatcccgccctggccaacgccctcaggaacgtctccctgcccgcccgctacgccggctacggcgacatggacctgaaggacgggcacgcctattcggcgaccacggcctcccaggtgggccagggccagttcatgcagagcgccatcgagcagctccaggtcatggccgagctgaccaagtcgcggggagaggtgctcgaggaattggagcggtccgagcggctccggcggctgcgggggatcgtcgagtccaagccgtccttggccggcctctcgtttcatgcccgggaaagcttcctggcgggcggcgacggaatgactctcgttccgatcagcctggagatcgcggccaaggacgtggccttccgcccggtcgaggaccggtaccggggcatggttaatttttacatcgaggtcaaggacgacaaagggacggccttccaagcgagcgaccgcttggagatgaatctcaaggaagaaagctatcggagacgatacgccgacttctatcaatacaagcagagcctgagcctgaagccgggcaagtatttcctccacatggtcgtttgggacgagtacaacagcaatgtcggatacgtcgaccgctggatcgacgtcccggcgttcccggcggaggatctgagtctcagcgacatcatcctggcccgggccgtccgaagagtggagaacaagacccaggacgcgccgatgaaccttcaggacatccccgccctcaaagccctggagaagacgaatttgaaagtccccgacaagctcagcctgtccggccagaagagcgggccgttccttttcggcaacctggaagtcaatcccaacactctggcggcgatcgccccgggcggcgatttgatcttcttctaccagatcaacaatccgacttacgacgaggaaagcggcacggcccgaatccggatcgaaaatcagatctggcaggggaccaagcttgtggctgtgatcgacgacatcccggaactgaaggtcccgatcgcccaaaaggcggccggacctttaaacagcagcggcaaatacagcctgggatccctcccgcccggaagctatgtgctgctggcgcgggtcggggatcttttttcagggaagacggcggagaaacgcatcgcttttaaaatcgaaaagtagatcgcgtccgtccggcctccccctggaaaaatccaatttattgaaatatatccaatttattgaatcgcgctttttaaagcgttattccccgtttttataattatatttattatcaacaatttatgggcgatttattgacgaaaaaaaatggcatggatattgcattaaaaagaactagatcctagatcgaggaagagagtaaatcgaaaaagagagtaatatgaactcgaaaatatattttcaggaggtgataattaaacggataagcgcgaatgaaaaaacggttggttgtttccgccgcggcaatccatattcagccgctgcgagaaggggaaaaaacaaatcccgagtcatcgggaccgaggaggaatttgaatgaatttgagaaagctgacaatcctatttgctgctttcctcatggtgacctccctcggcttggcgcaatccaaggactatggcacgtttatcggcgctgtttacagcaccgaaggcactccgcttcccggagtctccatcacggccaagaacctggatatgggcttaagccagtcgacgatcaccaacgaccagggcttttaccggattgagcgcctgccccggggcaaatacaccctgacggcggccctgcccggattcaaaaccctgatcaaagaaggccttgagctttcgatcggcgccgaggtgaagatcaacttcgacctggaaatcggcgacatcgaagaggaagtgaccgtcatcggagtcaccccgctcgtcgagacgacgcgggcccaggtctccacggtcatcaccgagaaagagttcctgagctatccccagggcaaccgcgactacacgtcgctgatcgcctatgctccgggaacgcttcccggcgcgggccggtccggctatgccatcaacggcatgagaggatcgtccaacaacttccagatcgacggcatcgacaacaacgacaacgggacggccaacggcagcggcaacatcaccagcatgccgcccgaggcgattcaggagttccgtctggtttcgaacaacttctcggccgaatacggccgcaactccggcggcatcatcaacgccgtcatgaagtccggaaccaacgagcttcacggaagcgcctgggtgttccacaagggaacgggcggattcttctccagcgaggactggctgacccacgattacatcgagcaggacagaacccagtacggggcgacgatcggcggcccgatcatcaaggacaagacgttcttcttcgccacgttcgaaggcgtcatggaaaactacggcagcgccacgccgtattatttcttcacgcccgacgccatcaagagggccggcccgaccgccaaggtcttcttcgacaaagtcggctcgaactatcccgttccgacgtatgatttcatcgacgtcgacggggacggctcgatcgacgccggccggtatatttgggacggcaccggcaagtaccggggctacaccggcggcttgaagatcgaccacatcttctccgagaaggacagaatcgccgtccggtggctgttcaacacctacaccgataagtgggatttcgccaacgttcccggcaacatcaaggaagtcccctatgcctaccacaccggcggcctcacgtggctgcatctcttcagcccgacgatgtacaacgaagtccggctgggctaccacagagactatgccgattggaaacgggtcgcccccgagattcctcagctcggcggctacacctatttcaacgacggcgtccacgccatcggcgactgggccaacatgccccaggaattcaccaacaacacctatcagctggtcgacgtcctgaacttccaggccggcaaccacagcatcaaggtgggcggcgagctccgtctctggaattccgactccatgtttgacgccaacgtcgcgggagcttattacttcttcgattcgacctggttcctgtatgacctcggcgcttactacctgtacatcggcgccgatccgcccgatccgccgaaggacaacccctatgtcaagggcgatccgtacggcgagtggaaacagggcgattcccggagaaaatggcagggcctcgaaggcggcgttttcgtccaggacgactggcgggtgaccgagcggttcaccctctccctcggactgcggtgggaatactacggcgtccccgaggagaaatccggcaagggcatcaacatgcccgctttcggcaccaaggccggctttgattccaagcaggtcatcgagggcgtcgagggcgaggaaggcgtccgctatctcattttcgacggccgccagctcctcggcaagggcctctggaacccctactacctggcgttcgccccgaaagtcagctttgcttgggacgtgaccggcgacggcaagacgtccctccgcggcggcttcggcatttcctacgaccggacgttcaacaacacctatgagaacgaccggttcaactatcccgacttcacattcgtcggcctcctcgggatcctggacggctccccggccatcgatgtttcttatcccgcggtcgtccccatggccaacgtgtccggttacggagcgagcctccgctggatgctccccgatctgaagccccagaaggcctataactggctgttcggcattcagagagagctgtcctccaacgtctcgatcgagatcaactacaccggctctcacggagccaacctcggctcgattcagcggcccaaccggttcaccggcgacaagctcgacaatacccggaccggcatcaacccctactgcgcgatcacgggcgtcaacctgagaacccagaacctcgagtccgactacaacgccctgacggtcacgttgaacaagagattctccgacggctggtcctggtacaccgcctacacgttcggctatgcctacgaccagaactccgactacttcggcgacaacacctccatggaagccgtgtccaatgagcggatcgacatggagtacggcttcgcccagttcgaccggagacaccgggtcgtcggcggattcgtctacgacatcccctggttcaagaactccgacaactggctcctgaagaacatcatcgccggctggcagatcgccggcaacttcgacatcacttcgggcgcgccgttcaccatcgcggcctccgcggcggcttacgattggaactatgactgggacaacaacgaccggccgctgtggctgggtgatgacgacaccgacatcatcacttggaccaacgggcgtcccggttgggacaagagcaatttcggcatcccggtcaagcccgccggcccgaacgacttgagctactacgaccagaccttcgccgagcggaaccagttccggtggttcccgacccacaacatcaacatcgccctgcagaaatactgggtcctgaacgtcggcggcaaggaattcaccatccagggcattttcgaggtcttcaacctgctcagaagctacttctgggcgttacctcgcaccacgtggcagtcggccgacttcggcgtttcgacgagaatgaacggccgccggacctcccaggtctcgctccggatcatgttctaaggcacgcgcacaagcaccacgcacgagttcaaaaccccgccccggtcaaccccggggcggggttttttttcggctcgatctttgctatattcaacgtatgcgcgacatgacgaatcacaagcgttttccgggacggtcgtccggccgcgtccgtccccataacagcctcgtcttccttgtcgttctcctctgggccgcggccggcgtgcggctctccggcgcccccccccaaggcaaggtccggcgggacgacggcttgaacatcctcctggtcaccctggacacgacccgggccgatcgcatcggcgcctacggctgggccaaggcgaaaaccccggtgatcgacaccctggccgccggaggcgtgcggttcgccaacgcctactgcccggcgcccctgacccttccctcccacgcctcgatcctgaccgggacttatcccctttaccacaaggtccgcaacaacggttcttattacctgggtccggaggccgtcaccctggccgagcgtctcaaggaaaaaggataccggacgtcggccgtcgtcgcctcgttcaacgtcgactcccggttcggcttggaccagggattcgacttctatgacgaccagttcagcgacgacgagatgctcaagacgttccggtccgagaggcgggcggacgaggtggccgacgccttcctgtcctggtttgcggggcatgcccaggaaaaattctttgcctgggtccatttttatgatccgcacatgccccatgacgtcccgtccccctacaaggaggaattcgccggggatctctacgacggcgaaatcgcctacatggatcatcacttcggccggatcatcgaccggttgagggagacgaaggtcctggacaaaaccctgatcgtcatcgccggcgaccacggcgaagccctgggggacaaaggcgagctggatcacggcatcttcatctatgacgtgacgatgaaagtccctctcattttctacgggccgaaggtcctgcccgccggacaggtctccgcttcccgggtgcgtctgatcgacatcatgccctcgatcctcgatgtcgccgggattccggcgaacaaggaaatccaggggacaagccttctgcccttcatcgaggggaagcggaaggatgatttatcgtgttacttggaaagctactatcccctggaaacctacggctggtcgcagcttctgggcttcatcgacggggactggaaatatatccaggcgccccgctcggaactttacaacctcgagcaggacgccctggaggaaacgaatctcttctcgaaggaaggcaaaaccgccgccgcgctggataagaagctggtggccgcgatccgggattattcctcgaaggcggacgcgggccggagaaagctgagccgggaggaggaggaacggctgcggtccctgggctacgtcggctccgacgcctcggtaaaaatccccaagggtcctctgcccgatcccaaggaccggatgaacgagttcaagcttctttatgatgcgaagctggccgaatacgaagggcgcctcgacgaatcggaaaaaaactaccggatggttctcgatatggccccggatgtctcctggcattacatcagcctggccattctcatggcccggcagaaacgcttcgacgaggccatcaaggtgctcaagaccggcatcgaccggatccccgactccgtcgtcctcatgtcccggctggccagcttttacatgagggtcggcgatttcaagggcgcttacgagatgagcgtggccaccttggccctcgacccccggcatttcgacgccctggtcatcgccggctggtcggaggacatgcggggaaattggaaagcctcggccgactttttcgggagggccctggaaatcgagccggaaaataaattcacccggctgaaatacgcgtatgccctgggcgccctgggacgcggggaggaagccgcggcgatcgacgaaaagctgaaatcggaatatcccaaggacggccggatctacaaggatctgggcgtcatttacacggcgctcaggaagatggacctggccgaggaaaacctcgccaaggcggtcgagtacagccccaatcccgacaattacctggcctacgcggccatcctggaacgggtcggcaagcttcccgaggccgtcgtcaatctgaagctttatttggaaaacacgcgggagggcaacaccccccggaagcagcaagcccaaaaagtcctggccgaatgggaaaagcggatcaaggaataggggatcccctttccttgaggatgtctcgatgtcaatacgcaagaaaagaaacggccggctcggacggtcgaagcgccggatcgcctccttcctcttgattccggcggccgccgggatcggcctggtcctgtccgcgggggccgcggacaaggtgaaaaaggacgccggtctcaatgtccttctcgtcaccctggacacgacccgggccgaccgtctcggctgctacggattcgccaaagcccggacgccgaacctggattccctggcggccggcggcgtccggttcgccaacgcttactgccctaccccgatgacccttccctcccactgctcgatcctgacggggacgtatcccatctatcacaaggtccacaacaacgggacctattatctcaaccccgagattctcaccctgaccgagcggttcaaggagaacggcttccggacggcggcgttcgtcagctccttcaacgtcgattcccggttcggaacggacaagggattcgaggtctacgacgacacgtacggccgggacgaaatgatcaagaccttccgctcggaacggtcggccgcggaaacgtcagccgccttcatcggctggctggacggcctgggcggagcgaaattctttgcctgggtccactattacgatcctcacatgccctatcgtcccccctctccgttccgggagcagttccccggagatccctacgacggcgaaatcgcctcgatggatcatgccttcggcgcggttttggccaagctcaaggaaaagaacctcctggacaagacgctgatcgtgatcgccggcgatcacggcgaagccctgggggaaaaaggcgaagtggaccacggcgtgctgatctacgatgtgtcgatgcgcattcccttcattttattcgcgccgcgaaaccttccggcggggaaggtcgtcgacgcccgcgtccggctgatcgacatcatgcccacggtcctggacctggtgaagcttccttccgtcaagaatgtccagggcgcgagcctcctccccttcatcgaggggaagagaaccgatgatctcacctgttacctggaaagctattaccccctggagacgtacggctggtcggagcttgtcggggtcatcgacaaggactggaaatacatccgggccccccggccggagctgtacaacatcaaaacggacaaggacgaaaatcggaatctttacgagtccgacccgcaaacggccgcggccctccggaagaagttcgacgacgttctccgggagaacacctcgaacctggtcctgagccggcggaaaatgagcctggtggaggaggaacgcctgcggtcgctcggctacgtcggcggcgacggcgcggtgaagcttcccaaggggcctcttcccgacccgaaggacaagatgggcgagtttcgcatcctgatggccgccgttcagagcgaatgggacggagacatggccgccgccgagaaaaattaccgggaaatggtccgcctggcccccgacgtcgcctggcgctacctggacctggcgattttcctttcgaaaaacaaacgcctgcccgaggcggccgcggtcctcgagcagggcttgacccggctgccggacgccttccccctctattcccggctggctcatttttatatggggctcggcaagctccaggaagcgctggacatgagccgggcggccctccggatggatccccgctatttcgacgccctggtcatcgccgccgccgtggaggacgcccggggcaattgggccgaatccgtcaaatattataaaacggccctggacgttgaacccgaaaaccggatggtcggcatgaagtatgcctacgctctggcggcgtcgggctccggggaggaggcggcggccatcgacgaagccctaaagcgggaagatccgaaggatttccggatctacttggacctgggcgtcatctatacctccctgggcaagctcgatcgggcggaagagaacctggcccgggcggtggagatctctccctcgcccgagacccatttcaactacgccgtcatcctggagcgcgtcggcaagctggccgaggccgccaagcatctgcgcctgtacctccagaagacgccggagggcgagacgacgcggaaagccgaagcccggaaagccctggccgactgggaaaagcgcctccgctgaggcgcttttccgcggccgccgctcttgtccggccggggcaagatattttaaacggcaagacatatcgcccgtcggaaagattttagacggcctgattcgccggtttgaaaatcgttccggggtgtgctagcattcttctttaacggaatccatcctttaatccatggaggcgttcatgaaaagatatgccgtttggagcattgtttttctcgccctgttcgctttcttatacacggccccggccggagccgcgaagaaaaaggaagccgacaagtacgagaattggatgaaggaagaagtcaagcttctcatcacgtcggaggaagaatccgcgttcaagaagctgaaaaccgacgaggaaaaggacaagttcatcgccttgttctgggccaagcgcgatccgtcgcccctcgacaaggccaacgagttcaaggacgaatggtacgcccgcttggaatacgtcaacaagacgtactccaagggctcgatcgccaaggggtggcatacggacatgggccgggtctacatgattttcggccctccggcccaggtccgcggaggcggatcgggccaggtgaggccggaatcggccggcggctcccagatcatggggcccccggaaacctgggtgtatcagcccatgcccgcccttggattgaacagcgagttcacggtcactttcctgaaccagcagttcggctacgacctggacgaaatgacgccccagcccgtccgccatgccttggacatcttttccaaagtcgtcattttcaatcccgacctcaaagagcttcccatgtacaagttttccctggatgaaagctcgaccgaggggaagctgatcaatgaattcatcgccggcggccgggaaatcaaccagattcccctggaatggacgccgatttacacccgggcgatgagcggcagcacgtacgtctccttcctggtccggatcgatgcccggggccttgaccggaaaaaactccgggacgtgacgttcttcggacgtctccagggggaaggcgaggaggttcaggaattcctgcatccgctcaagctcgatcaggacaagtccgacataatgctggcggtcttcggctttccggccaaggccggcaaatcggtcctttatctcggcgccgaggacaaggacaaggagcttcacaccctggtgaaggccgatctggatgtgcagaacttctggaacgatgagctgaacacgagctcgctcatcctcagctcccaggtcatttccaagcccaaggaagaggccggggcggaattcagcccctttgtcacgaccgactacaaggccgccccgcgctggggcaacgccttcaagccgagcgagtttctgagcgtcctctatcaggtttacaacgccaaaacccaggacggcgcgctcgacctgtcgatcgattacttcatcatctccgacgaagccggctaccggctgaatccccagacggtcaagaccaaggtcgaggaaaacatggccgtggcctgcggaacggaggtccccctctcgccgctcaagccgggcaagtacacgttcaagatcagggtcacggacaagatcgccggcaagaacgtggagaagaccgcgccgttcgtggtcgaataacaggccggtcatgctttgctccccgcgcggctttgtcgccgcggtcttggtaatcacggccgcggcctgcgctccggtggtcccggaggatccgaacacgatcgaaatcacgaaggtcgggagctattcctatatgcggcagagccgtgatttggccatcgtcgtcgacgtggagatggcccggaagcggaccgaggaggcgtatttccccctggggatcaagatcgccaacaagcgcctcggccaggtgattgtcgaccgggagaccctggtcctcgtggatgagaacggccggatttactccatgccgggcgtcgtcgagctcgagcggaattacgacaagctcgttccggatcacaagttccagagccagaccgggatcatgggcgacacgctcttgaccggcttctcctattaccagaaagccgacagccgctttttcccccaagtccagggcggcggccgggtgatcgattcggtgaaaatccgggcgcacgggtacctggaagacatgatttatttcccgatgcccgagggggggatcaagggaaggatgctccgtctccggctggacgtctacgagctcgaaaagccgttcgagatcgtctttcccgttcagtagggccttcgggcggatcgccgcagccggccggactcagtccggccggctttctttttcttgctcgaggagaacgtcggatccttgggcgttcaggtcgccgccgacggtcccgtccgttcccaggaatcccaagcagtcgggatgaaggggcatgaccccgaacgtctcgcggcccgtttcgtcccggagaagacccagcgggtaaagacggcagacgagcggccggaccggatgaacgcggcagaggccggcctccaggaaaacgcagtctccgttggaggcggagagcagctcccccgattccgagtcgagaaaatccgtcgtgaagcgttcttccggcaccccgaggaagacggccaggcgcttccgctcggagggggaaagcatcaggcgcttgttggcgcagcagacgccgcagcgtcggcagtggaaggaataggggctctcccggtccagccggaacgacagcgcgccgtcgtcctcgtcgaacaacccctcacccgatgatttgaagggcggcgggaaggatcccgatctccaagtcgttgaatctcgtccggccgtcgttcgtcccgaggatgtctccgtcggcctggatctccatgggaacctcggaccggagacggaaaacaccggcctgccggaactcgacttggcggagccgtccatgccgccctttcccggccaggcggtatatctcggccaggcggagaaaacggcagggcttgatgaggcaaagatcgagaaggccgtcgtcggttcgagcctcgggggcgatgatttttcccgtcgcccagtagcggatgttggaaaacacggccgccagaatctttccggaataggccggcccgccgtcctcgatgtcgaggcggagcggcacctcccgcgaccagagagcggcccggacagccagataaccggccgcccattgccgccgggccgttttcctcctccgctcggccatgcgggcgacccgccggttgacaaccgcccccagcccgacgttggcctgcccgaggaaacagcccaggacggattctccggcccggacgaggccgaggtcgatcgcccgggtccgtccttcttttaaagcttggacggcccggtccatccgctccaagccgaattcgcggggaacgtcgttgctcgagccgaggggaatcattcccaggacggcgtccgtccgtccggccgtgatttccccggcgatgatcgaataggtggagtcgccgccggccccgacgatgatcctatagtcccggccggcctcgcgggccagccggcgcaggtggcccgcgctctgggtcacgacgaacgcgtgttcgaggccggcccgattgagagcggcctggagaatcccccgcttgccggcggcccggccctggttggaggaagggttgaagagaacgagcatcggtttcatgggcttaaacaccatccttcggccgggcgttcatcgccgcggcccggccggagagaattgcgtggacgcggtcgagatcccggcggacgcgggagagaatcggcagccagagaaaaacattgaaaatccaaaaggccaggaccgcggccatggccgtccgaaggccgaaacgggtcgccaagtaagaggcgcaaagcgggccgagggcgtttccggccatgtccatcaccgaggcgaaggagatcatcgccgcccggtgttcgggcaggttgacgtcggtcagggttccgtaccaattcggattcacgccctggttgatgaatacggcggccgcgatccaggcggccagtccggccgctccggggacggcgaacgtttcgccgacgcccgccccgtccgggatccagacgcgggaggtcaaaaacgggatcatgaagagggccgggacggcgttgcagaggagcgccgtccagaccttggcccgacggtcccggcggaaccagagatcgccgacccggccgaagacgatcgctccggccgccccggcggcgaagatcccggtgatcgcggcgttgacggccgcggcgtccatgttgtggacgtccttcatgtatttgaagatcaggaacaggatgatcgagccggggatgacgtcgacgaaattgaagatcagccagaggttggagggggcggcccgaagcgcgcccgcgtctttccgcgtccagcggaaccggtagacggccccggccagaatcgcctcccgcagctcgggttcgcggattccccgcggaggctctcggagcgaggcgagggccgcggccagggcgagattgatcgccccgatgagggcgtaggcggtccgccagttcgcggcgaacgcgccgccggcggcgaagccggccaggcggccggccagcatcgccaccgagaggacgccgaacgccgtcgaccggcgatcggcggcgacgaggtccgaggccagggcgaaaaccgagggaacgatcagcccgattccgaaaccggccagggcccgggcgagaaaaaagacggcgtatcccgtccggccgtgggggatcaggacggacaggacggcgatcgcgccgtacgtcaaggagccggccaggcagagacggaggcgggagccgcgcccggcgagcaggccggcggcgatggtcgcggccgcggcgcatagagtgaagacgaacgtcacccagccgagcgggacgatgtcggccgtccgcccgaaaaaatcggacaagagcggatcgagcagcgggctctggagggactgatcggcgaaattgaagacaagaagaagagcgaggaccgtgaagacggccgtcgaagccgtccggatcgtcctcgtttttccgccgctcatgcatgccctccgaggctgtccactatagcgaaaagcgcggagattgaaaagagccgggggcctttgcgccttgcggccggctggcatataataaccgcggcaaacgagcttccgatgggcgacctcttgaaatccctccgtccgggccaatggacgaaaaatctttttgtcttcgccgccctcctgttcggccgggaagcgttgatcggctcctccgtcctgcgggccgccggggcgttcgccgttttctgcctgctgtcgggggcgatgtatcttgtcaacgacgtctgcgatctcgccgccgaccgcctccatccgaagaagcgccttcgacccatcgcctccggccgcctttcgacgcggcgggcgctggccgcggccgtgatcctggccgccgccgccctggccggagcgttcgttctccgtccgcggctggcggtcgtggccgccttctatgcggccctgatgctggcttactcgctccggctgaaaaacgtggtgatcctggacgttttcctcatcgcctccggattcatcctcagggtcgtcgccggcggggtggtcctcggcgttcccctgtcctcctggctgatcatctgcacctcgcttctggctctcttcatcggtttcggcaagcgccgtcatgagatcgtcttcctggaggcggacgcgtctctccaccggtccattctccgggaatacagcccccttcttctcgaccagatgatttcggtcgtcaccgcctcgacggtgatcgcctacagcctctacaccgtttccgaggagacggtccgcaaattcgggacgtcgaacctgatcttcaccatgccgttcgtcctctacggcctgtttcgttatctttacctcgtccaccagcgggggcagggggggaatcccgaggagatgatcttccgggacaagccgctggccgcgaccatcatcctttggatcgcctccgtcgtttttattctttacgtccgctgagcccgttttcagcctgaagccagcgacggcttttcggctcccgctccaggtggaaaatgatcatcgcctgcaaggcgccggcgaaggagcggatttcttcggacgaaaacgggagggaggcgcaggcggagggcgggttgtcccggacccaggacaggaaccggcccaggttttcccggatctcttccttccgcgagggcgcgcaggcgtcgcagaatacgccgtcccggcggggggacagccaagccggggccggatcctcgatcgcccgccggcagaggcggcagcgccggatgtccggcaggattccgttgagacggaggagccaggcttcgaaatatcgggtcaggatctggacgtcgaccttgtcccggacggcccggaggatcgagagaaagaggcggaaggccaggttctcccgggctcggaccggaacgaattcctcggataattcagccatgtaggacagggcgaagccggccgccggatcggagaagacgtcgaagaacgattcgcggaggtcgcaggagctgatcgtgaccaggtcgctccgttccttctcgtaaaagaacacggtgacgtgggacaacggctcgagggagctgccgaaccggttcgcgaatttccgggcccccttggccacgccgcgaaggacgccccgctcggccgtgagaaaaacggcgatcttgtcctgatcggccaagggaaacgtccgaaggacgatggcttcggcctgatcgcggggcatgcggcctcagggaagcaaggtgatgcgcaggtcccggatcttggcccggagattctccggcgtgatttgaagctcggccgaggcccgcatttcatcccattggtgccggcggagcgcctggtgcacggcctcgcgctcggccctccggacggcttcagccaaggagggccgggaggccggcatcggtccttgctcgcgggtttcgaccagaaggttcaaatggccggggccgatgacttgatcctcgacgaggatgacgaaacgttccaggacgttcatcaactcggcgacgttgcccggccaagagtagttgacgaacgcctggagcgcctccggatggatggatttgggcatccggccgtattcgcggcaatagatcctcaagaaataggcgatgaggaccgggatgtcctcaagccgctcccgcagcggcggcagcgtcaggggaatgacgttgatcttgaaaaacaggtcctcgttgaagcgcccttgccggacgaggtcgcccaggctggccttggtcgaggcgatgacccgggcgtcgaacggaaccggctcggagccgccgagcggctcgaaggatcccttcgccagggccaggttgagagccgcctgggtccggagggtcagggtctcgatgccttccaggaaaagcgtcccgcctccggcctggacgatctttccctttttttccttggccgggtcggggccgtggcccttgaggcacccgaaaagctccgcgtcgatcagggtttcggggagggcggcgcagttgacttccacgaaccgccgatcccgccgcgggctgcgctgatgaatgaggcgggcggccagctccttgcccgttccgttttcgccggagatgaggatccggccgtccgtcggggccgccgcccggatcttggcccggaggttctgaagggcggggcttttgccgaccaggcaattgcgtccggccagacgctcgcgcaggcggacgttctcctcctccagccgggcccggaggagggagttgcggacggtcagcacgactttttccagggacagaggcttttcgaggaaatcgaaggcgcccatcttgacggccttgaccgccgtttccacggtcccgtggccggagatgaccaccaccgccggacggtcctcgtggcgctggatctcggccagcacgtcgaggccgttcatctcgggcagccagatatcgagaatgaccaggccgaagctttccttggacagggccgccaatccctcctctccggaggcggcggttcggacggcatacccttcatcctccaggattccccggagagaggaccggatggccgactcgtcgtcgatgaccagaacgcgttcttgactcatgcaggcagctcgatcgtgaatttcgctcccatcggccggttgttttcggcgcggatgaggccgtcatgctcgcggatgatttggctgacgatggccaggccgaggccccggccttttttcttcgtcgaaaaagtcggcaggaagatcttttccgggtcctcgacggagattcccggccccgtgtccgtgactgtcgcccggacgcggcgggaatcgcggtcgtaatccgcttgaagagtgattgtaccttttttattcatcgcgtcaatggcgttgtcgatgagattgatgaacacccgcttgatctgctcggcgtcgagccggatctcggccgggacatccggggcgatccggatctcgaagacgatatcggcgtagatcccccggaagagattggcgacctgccggatgatgtcgccaagggaggccggctggagatggatcttgggcagccgggcgaaatccgagaactcgtccaccagagccttgatcgtctgggcttcctggatgatcacccgggcgccttcggcgacgacctcgccgcccgacggatcgcccttgtggatattgcggatgatgcgctcggcgttgagctggatcggcgtcaagggattcttgatttcatgggcgacccgctgggccacttccttccaggcggcgatcttctgggacgtgatgagctgggtcaggtcgtccacggccacgatcaagccggagaagtcctcctccggcttgcgaagaggcgtcaggttcagcgacagggtcttcgtctgcacgcccatggtcatcgggatctcgcggtcgctgatcctggcccggttgacgaacgccgtctcgatggccgcccgcagcgcctggtagcgctcggaggcgaggagatcccggtaggggcgcccggtcgcgtttttttccggcaggtccagcatctcccgggcggccgggttgatggtcgccacgatgcctcgggcgtccagggcgatgaccccggtcgaaatcgcattcaggacgatttcgatcgtccgctggcgggcggccacttcggccgttttggccgcgacctccgcctcgcccttccgcaggtcggcggtcatctggttgaaggagtcgatgagggtcccgatttcgtcggaggcgggatcctcgatcttgatcgacaagtttccgcgcgagacttccttggtcgcgtaggccagtttttcgatgggaacggtgatgctcttggcgatatgaaagccgatccaaatggccgtgaagacgatgatcagggtgacgaagatcaaggtcagggtgtagagcgtcttcgtcagatcccgctgggtcccccgcatgcggtagcgttcgtcgagggccatgatcgagttcattttctgcgttaggttctggggaaggaatttgccggccgtcaccaggaccgctcccatcttcgggtcgatgaacgacacccctcgccggacgaactcgcccgcccccatcggggtgatgtcgttgaggtccaagccgagatgggccttgcggacctcgtcggcgttgaggtcccgatagtcctggaggggaagattcggattgagaagggaaaacagctcctcccccccgagaaagaggctgatttcgtccagccggtattcgttcagcttccccttgacgaaatcctccaagcgcggccgccgggcggggtcggccagctcggaccgctggatttcccgggcgagctgctgggcgaaatgaaaggtctcgtccgacgtcgtcgcgtagaatccatcggccacggcccgggtgtccttgaccaggcgggtgatatcgaggcggaaccactgctcgatgctgttgttgatgatccggctggtgaagatgaagaggagaagcgtggggatgaaggagagggcggtgaagaagatgacgagcttggtcttgaaatgggagccgacgaccttttgcttgcgctcgaggtaaagcttgaccaaataccggccgagaacgaagaacaggatcaaggccagcagaaggacgatgaactggagggcggccaggagaatggaggtgaccttgcccggggagaattcggccgaaccgcggaggaagacgtcgatgacgaagaagaggatgacgagaaggaggatgaccgagacgacgacccgggtgcccttcttctgccgccggccctggttttcgtccatgggcgtcagcggacggcgccgccggccggcggattctcctcccggaggaatgtggtcgaattctcgcgggtgatgcggatatccgtcaggacgacgccgcttcctcccaggggccgcccctggcgtccgttcaaggtgaagtcgaagccgccggcattgcccgtctggaggatgaattccctttccgcccggagcgaggccgtcgatccggccggcttgatcccgtccaggacgacgacgccgtcggccgagatgtgcatccaggaatcggcgttgaaacggagctcgagacggaggcccgtttcggccgggacgggctcgggttccttggccgcggccggctcgggcagggcggcctcggtctgcggggccggaatctccgtcgaagaaaccggcggagcggatttttccccgggcttcaggaaaagcagatatccggccgcggccgcgccgaggacgagcaggaccgcgagggcggggacgagaattcggcgcgttcccccggcctccgcgccgcgcttctttcgttttggagattcgccctcgttcccgggggattccaagcgggccttctcctgttcctcatagcgggccaggaagggctcgggatcgacgcccatggcttgggcgtgggccttgatgatgctccggatgaagaacttctggggcatttcctcccagcggtcctcctcgagggcgacgaggtagcggagcccgactttcgtccggtcggagatgtccttgagggagagcgaatgcttctcccgctctgtccgcaattcttgtcccagggtggccatgtgttgagattttaggtcaccggcggggaagatgtcaatgaaccggcggctctatgacgcatcgcgtggagataaaagggcggagttcggccggcggactcggctgcccaacagtcgttgtttctgtctgccccgcggcaagccgttcacggaagttaattcgttgatcgggccggggcgaggatcaagagcggaaaacgcggcccagggcggccaggctgccgagaagaccggccaagcccccgccggcgacgaggccggcggcttggaggagggagagcggctcgaagccgatgagatcctggagagcgcccagggaatggccgagatagagcggaaagagacgagccgcgagcaggaccagtccggccgcgaccgtccccccggccactcccaggatcaggccctcgaggagaaaggggccccggatgtagccgttcgtcgccccgacgaggtgaaggatggagatttcctcgtgccggctcaggatgttgaggcggaccgccccggagacgacggcgatggacatcaggatgagaaggccgccgacgacgaccccgacggcgtcgctcaaccgcccgagggcccggacgcggtccgaccagcggcggttgaactggatgtcctccaccccgggaagccgccggagaccgtcgatcatccggtcgatgggcgcgtccggaccggccggatcgcgcaggatcgcctcgatcgaggccgggaggggattgcggccgagattttccaggacgtcccgaagatcggggaattccttgagaaaccggtcgcccgcttcctccggggtgacggtccgaaccgaggcgacgaggggcgacaggcggacccggtcctcgatcgtccgccgctcggcggccgtggccgacggactgaggtagacgacgacggcgacatcccgggagaggatccgggcccggctccggaggttgttcgaaagagagagaaagaggccggccatcagaaaagagaggacgaggacggcgaaagagacggcgtggcgggtcttgccccggcgcagatgccccccggcgtcccggaacgcccgcccgatcttccgcccgttcacggcgccgtcccccgctcccgcatccgtccttcccggagggccagaacgcggccggcgaacttgcggacgatttcccggtcatgcgtgcagatgacgacggtcgtgccctggcggttgatttcccggaacaaggcgatgatttccgaggcgaggtcgggatccaggtttcccgtgggctcgtcggccaaaagaaggcggggattgttgacgaccgcccgggcgatggccacccgctgttgctccccgtaggacaggccggccggcgtattccagatccgatggtggagcccgaccatgcggagagcgaggaaaaccttgcgcttgacgtccttggacggcaggccgaggacgcggagggggacggcgacgttgtcgaagacccggcgctcggcgagcagccggaaatcttggaagaccacgcccatcgtccggcgcaggacgtagatcttggcggaggggatgcggcggatgtccatcccttcgatcaggatgcgcccgtcggtgggcgggcactcccgggtcatcagccggaggatcgtcgatttccccgatccgctcggcccggtgatgaagaccatctccccggccgcgacggcgaaggaaacgtcggagagagcccagtccggtttatgatactgcttccaaacgtgactgaactcgatcatcgaggccccggccggaccgattataccatcctcacagggtgaaaaggtacatcagccagccgaacaaaacggccccgccggccatgcctccgaacatgatcaggccgtatttcaggcggctttttgcctcgtcccggcggaggaaggccaggacgaccgcgacgagggccgcatataggatcatcgagagaaggtggctgcggaaaatcatgactttgtccccgcggcgatgtcgtaagcatcgagggcgacgaggaaattcagaagccccgccccggccaagtacgcggttccgaattcgaacgtcgccagcttcaggtcgccgatcccgacgggcaggacgcgggagagaagatagagaagcccgttgccgatgtcggcgaagaaggccaggatcgtcaggggattttccgtttggaaggggtagatccgtccgcccagcgccaggccgagggccgtcatggccgccaggcagccgaaaaagaccgccccgcggaggtatttcctctggagaaaatggccgaggccgggcacggcccagccgagaaccatcaggacgacggctttgattttcatgacggaggacatcttagcagtctttttttagagacacaagagccgtgtcccggatctccggccggccgggcgggggatctcgccgggagcgaaaagggaatgacggccttgtgtctccggcgggatcggttacaataccggaatgcctgagctgcccgaggtcgagaccatcgccgccgccctgaggtcggcgatcgtcggccgggaagtcgcggccgcccgctgttttttacccaagctcctgcgggcgacggagccccgggatctcgatgccctggccggggcgcggatcctggccgtgaggcggcggggcaagatcctgatcctcgaggcgcctccccgggcccttcttttccatctcaagatgaccggccggttcgactgggagaacgccggccgtcccctctcgaaacacacgcatttcgttctctcttttgccggctcggacggagagcttcgctttcgggacgtccggaaattcggcttcctccgctgcctgccgcgcggagaggtcgaggcctgcgacgagatccggcggctcggccccgaacctctggacatcggcccggaagaattcgccgcccgcctggccgcccgcagaggccggctcaaaagcgtccttctcgaccagcgcgtcctggccggggtggggaatatctacgccgatgaagccctccacgcggcccgccttcatcccctgaccgcggccggccgcctgcgtccggacgagttgcgccggctgcgggcgtccctccgccgcgttctggcggcggcgatcgccgccggcggctcgagcatccgcgattaccggagcatcggaggggagatcggcggctttcagactcgtcataaagtctatggccgggaggggaaaaaatgccttcggtgcggggggcggatccggcggatcgtcgtcggcggccgggcgacgttttattgcccgtcctgccagcgcgaaaaacgctgaaggcgggaagccgccgctcttcccccgcgatggttccggggggttctcgttcagaatgatcgtcgacgctcccggcccgggattgggggacgcccccggaatgaggggaaagaggatgcgaatcgctcgggccggcttggggttgagcgaggcgtccctgaattgttataatgcctgggccggttccaacttcattcgcgggagagtgcgacgtggccttttcatccctggatgaaatcctcgccttcgccgttctccgcgagcaggaagcggccgacctctacgccggtctggctgcggccgcccggaccgagcctctccgcgcccttttacgggagctggaagccgaggagcgccggcacaaaatcctcctggaaaaataccgggcgggaatgccggtcttttcgggcggaccctcggttccggacttgggactgaccgacgcggccgtggaggaaccccccgggccggacgattcggtccaggacgtgctgatccgcgccgcccggaaagaagcgcaggcggccgacctctacggccggttggccgccgccgtttcggacgccgcggcccggggcctgttcgaattgctcctccgcgaggagctgaggcacaagttccgcttggaaagcgaatatgaagcgcgcatcctcaaggaaggatgagcgcccggcctctgtcgattcatttgaaaggagccaccgatgacgaaatgggaatgcacggcttgcggctatatttatgatccggccgccggcgacccggacaatggaatccctccgggcacgcccttcgaatccctgcccgacgactggacctgtccgcaatgcggggtgggcaaggactatttccggaaagtcgaggactgagcggcggccgccttcttctccatgaacgtcgtcattgtcggaaatggtctggccggaacgatggccgccaagaccatccgcgatctggatgaccgcgcttccgtcgtcgttttcgccgccgagaaccggttgtattatccccggccgaacctgatcgaattcatcgccggccgcctgcccgaggaaaagctctatgcctttccggccgactgggcggcgaagaaccggattgatctccggctcggcaccgccgtccgccgtcttcacccctcggaaaaaagcgtcgaggcggccgacggatcgattgttaggtacgaccgcctcctcctggccgacggagcctcttcggccgtccccccgatctccggggcggacaagcccggcgtcttcaccatccggacgctcgacgacgcccgggctctcctggaatatttccggacccatccgcgcgtcgccgtcctgggcggaggcttgctcggcttggaaatcgcccgggccctccgcctccggggggccgaggtcacggtggccgagatcttcccctcccttctgccgcggcagctcgatccgccgggcggagaaatcctgaaggcccgtctcgaggagaccggcctccgcgtgctcctgggcgtcgcggccgcggaaatcaccggagagtccgaagcccgcgggatcgtcttcaaggacgggacgcgcctggacgccgacgtggtcgtcctcgccgccggagtccgcccgaatacggccctggcccgcgaagccgggctggccgtggaccggggcgtcaccgtcgatgaccggatggcgacgtcggcgcccgatatcttcgcggccggagacggaaccgagcaccgcggccgcctctacggcatcattccggcctcgttcgcccagtcgcggacggccgcggagaacatctgcggccggaccaaaatttatgaggggacggtcccctccaaccagctgaaagtatccgacctgcccctcctgtcggcgggaatcatccggccggaagggccgggctttgaggaattccggctgtcccggcccgcttccggcgtttacaagaagatcgtcctcaaggacggcgttctggccggggcggtctggatggggacaaaaaccggcgcggccgagatcgccgcggccgtcgccgccggaaagaacgcggccgcctggaaagcggacatcctcgaagacggatttgatttcaaacgcttatgaaacacattcgcttgtccgccgctctcccggccctcgccctggccttggccctggccggaccggccgccgcccaggactcgaccggcctcaaggtcaacggctatttttccttcgacatcctccggggaccctcgggccttccggcttccgcgtggagcgtggccaatctccggggggggctgatcttttccgggactcttacgccgggcctcgtcttcatcctggagccgacgttcgcccaaggcgaggcggtcggcttgaccgaagcccgggcagggctcgccgtcgccaagggcgtcagcgtcacggccggtctctttctcgttcccttcggaaaatacaaccggtcccgccggccccatgaaaccgccctgatctccgatcccccggcggtcggaaccgtttaccccgtgaattggcgggaaatgggaatcgaggcggaagcctcgttcggcaatttcaacgcggccgttttcgccggaaacggcctggccgagggagccgatttcggcgccggccagcagtactccgacaacaataaaaacaagggctggggggggcgcctgggggccgccttaagcgcttccctggaagtcggggggtcttattaccggggcaaggccgacgcggccaacgagcgggcggtcaccatggtcggggccgacgcctcctggcggacggagaacatccgggcttcgggcgaatacgcccgggcgacgatcgaaaatccggcccccttctccaagggaacggccgaaggatggttcggcgccgtcgagcttcactggggctcctggatcccggttgtttcctaccggcgtttccgggccgaagatcccttccacgggccgggattcgccggtccggacacacccggcgcggggctctcccggaacggaacgcaatgggccctgggtctcgtttattctccggcgcccagcatcttcatcaaggtcgaggtcgaccgggggcgggagcagggcggagacgcttggcaatcgacgttccgggcccaagcggcgttttatttttaaggatcaagaggcgcgtcatggcgaacattgtcattttgggcacccaatggggcgacgaggggaaggggaagatcgtcgatctcctgactccggccttcggcgcggtcgcccgctaccagggaggccacaacgccggccacacggtctacctcaacggccggaaagtcgtcctccacgtgattccctcgggcatcctccatccggggacgctctgcctcatcggcaacggcgtcgtgatcgatccccgggcgttcttggacgagctggaagctctgaagtccgtcgttccagtgggggaggactcgatcgccgtcagccggacggcccatctcatcttgccgtatcacggcctgctcgagcgggccgccgaggcggctttgggcgaaaagaagatcggcacgacttgccggggcatcggcccggcgtacgaggacaaaatcggccggcggggcatccgggcgggggacctttgcgacccggccctcctccgggaaaaaatcttccgcaacaccgcggccaagaacgaaatcgccgccctgtggggcttggagccgcttgatccggaaaagctcttcgcccaatacgcggattacggggcccggatggcgccctatatcaaggatgtgtcccgccttctccacgagacgcttcgggcgggaacgccggtcttgttcgagggagcccagggcgtgctgctggacatcgatcatggaacgtatccgtatgtgacgtcctccaatccgaccgcgggcggcgtctgcaccggcctgggcgtcgggcccacggtcatcgacgcggtcctgggagtgatcaaagcttacacgacccgggtcggatccgggccgtttccgaccgagctcttcgacgaaaccggcaagctcctggcccggcggggcgacgaattcggggcgacgaccggccggccgcggcggtgcggctggttcgacgccgtggccgccgcctatgcctgccggatcaacgggatcagccgggtgatcatgaccaagcccgatgttcttgacgagttccccgagatcaaaatctgcaccgcctatcgctacaagggctcgtcgctccgcgattatccggtggaaacggaagtcctggaaaaggtcgtccccgtctacgaaacggtccctggatggaaaacgccggtccgcggcgtccgggaattcagggatctgccggccggtttcaaggatttcctgaagcttgtcgaggaccggatcggggcggaagcggccatgatatcgacgggagtcgagcgcagagagacgctgttccgggacgatctcctggcgggatggatcgacctggccgccgtccgaaagggaatcgccggcgcctgagcgccgggaccgacgccgggcaggaggcatccgatgagcgggccatgcgacggccgcttctggcaatggattgagatcgagcgcaaagccctggcctccaacgtccggcgtttccgggccctggccgggccgaggcggctgctcctggccgtggtcaaggcgaacgcctacggccacggcttgatcgaaacctccggccccgccctggcggccggcgtcgactggctcggcgttcattccgcggaggaaggcctggccctgcgcgaagccgggttaggctgccccatcctgatgctcgggcccgccgctcccggccggatcgaggaggccgtccggcaggatctccggttcaccgtctacgaccgggccgcggccgaggggatatcggccgccgccatccgcctgggaaaaacggcccggatccacgtcaaggttgagacggggacgaaccgccagggcctcccggtcgccgaggtggtctccttcttcgcccggctggcccgtcttcccggtctcgaaatcgagggcttgtcctctcatttcgccaacattgaggatacgacctcgcttgcctatccccggcgccagatggccctcttcaacgaagccgcggccgccgtccgggaggccggttatccgatccccatcaagcatatcgcggccacggccgcggcgatcgtctttcccgagtcgctttgcggcctgatccggatgggaatcgggttgtacggcctctggccgtcgaaggaaacgtacttgtcctgccggcttcgcaagaggaggccgttcgttcttaaacccgttctttcctggcgggcccggatcgcccagatccggcgcctctccaagggggcgttcatcgggtacgggtgctcgtaccggacgacccggccgacgcggctggccgtcattccggtcggatacgccgacggctacgaccggggcttgtcgaacgccgcctacgttcttctccgcggaaagcgggccgtcgtccggggccggatcgcgatgaattttttcacggtcgacgttactgacattcccggggcggcggccggcgacgtcgtcaccctgatcggccgtgacggccgggaaacggtctcggccgaggccctggccgccctggccgggaccatcgggtacgagatcctcgcccggctgaatccggccatcccccggcgggtgatctgatcggtttttcggttttcccgcttttcctcccccttgctatttttttatagtcatggcataaaggacccgatcctacacggaatctgactgggaggagtgcatgaaacgcatcgccgtcgctctcgcccttgtgctcgcgatcggaggactggccctgtccgcggaaacgaccgtcctgaaggtgaaggttcagacggccaacatccggacccaacccgacctcaatgccgccgtcatcaagcaagtcaaaatgggaaccttgttcgagtcctctcagacggccggcgactggtacgagatttcagtgacgaacgatctcggcgtcaccttgaccgcctacgtccacgccaacgtggtcgacgtcatttccggccccggcctcgccgtccagccggaagcccagcccgtcgttcggcccgccccggcccccgcccggacgccgtcctacgagcggcggccggcgccggagacaacctatcccggcggtttcaagatcatggccgcctacgggatggccagcctgacctattccgaggaccccgccgaggaatacaatgagtataaaaaatccctcatgggcttggcaggaggggtcgggttctattccggaggcctgttgggggtggacgtcggcttgatgtacctgcccaagggaatccggtacgaaggatcgctgtcggggtctgatttcgacgtgaagatgcggatcagcgagatcagcgtcccggttctcctgcggttcaacctcccggtccagggaatcaacccgtatcttctgggcggcggcgagatcgcttatgtcgcccaggccaagtacgactacacgatcagcgggggcggcgacagcgactccggctccgaggacatcaaggacgacgtcgcctcgatcgattacgggctcgttttcggcggcggcctggggatctctctcagcgggatcaatctcgtagccgagcttcgctaccatttgggattggccaatcttgtcaaagacccggaggaaggcgatcccacggtcaaatcgaatatgctggtcttcctggccggcttccgcttctaaggctccgttccggcggaccgtcggcggccgtcttggcaaatcgcccgaagaggcgtatactaatactatcattttaatatgataatcgtgcgggcccgccggcttccgccgcccggcccggggagcgatgcccatgacgaccgccgccgcggccggattctcggccaacgcccttcggatcctcaaagcccgttattttctcaagaacgagaagggagagctcgccgacgcgtcaccggccgatctctttctccgcgtcgcccgggcggtggccgcggctgagcgctcggcccgggaccgggaagcgtgggcggggaaatttttcgacctcatgacagcccgcgacttcctgcccaacagcccgaccctgaccggggcggggcgggacatgtgtctcagcgcctgcttcgtcctgccgatcgaggattcgatggaatccattttcgacgcggtcaagaacgccgccctggtgcacaaggagggcggcggaacgggcttcgatttcagccggctccggccgcgcggcagcttcgtccgccggacccagggagtcgcctcggggccggtctcgttcctgaaggtcatcgacgcggcgaccgaggcggtcaagcagggggggacgcgccggggggccaacatggggatccttcgggtcgaccatcccgacatcgagaacttcatcctgatgaagaaggacggccggagcgtcggcaatttcaacatctcggtggcggccacggacgccttcatggaggcggtcaagaaaggaaccagctacgagatcttcgacccccgctcgaaaaaggccgtcgaccgcaaggacgcccgcaagatcttccggatgatcgtcgaatcggcctgggcgatcggcgatccgggattgattttcatcgatcggatcaacaaggccaatccgacgcggagccaggggccgatcgcggcgacgaatccctgcggggagcagccccttcatccctacgagtcctgcaacctcgggtcgatcaacctggccaactttttcgccccggccggaaaggacgggttcgactgggaccgcttcgccggggtgatcgccgcggccgtccgcttcctggacgatgtcatcgacgtcaataaatacccccttcccgagatcgaggcgatgtccaagggcaaccgacgaatcgggctcggggtgatgggctgggccgacctcctgatcaagaggaagatccgctacgactcccccgaggccttggccctggccgataagatcgcggcgtttctccgggcccgggccgaggaggaatcctcccgtctggcgaaaatccgcggcgactttccgaacatcgccaagtcgatctacaagggccgccggatgcggaacgcgacggttttaaccatcgccccgaccgggacgatttcccggatcgccggctgttcctcgagcatcgagccggtcttcgccttcaccttcacctcccgcatcctggacgccgagctcaaggatgtccatcccttgtacgccgaatgggcggagaaaaaccccggaaaggagcccccggcgtatttcgtcacggcccacgacatctcccccgaggcccatctccggatgcaggcggccttccagaagcacgtcgacaactccgtctccaagaccatcaacctgccccacgcggcctcgctgaaggatgtcgaaacggcctatctccgggctttcgacctgaagacgaagggaatcacgatctacagagacggctgccgcgaggagcaggtcctggtcaaggcaagcgggccggccccgaggattccggaggagcggccggacaccttgacctcggtcacggataagatcaagaccggattcggcaatctctatatcaccatcacgttcttcaaccagaagccgtttgaggttttcgcctcgatcggcaagagcgggtattcgaccatggccgacgccgaggccatcggccggttgctttccttggccctccgaagcggggtcgatcccaaggaactggtctcccagctcaagggaatcgggggatcggagccgattttcaccgagggggggctcgtcacctcgatcccggacgccgtcgcccgggtcctggaacggcatttcggggcggcgaaaaacggcgcgcgggacatgtaccagtcgcaatgcaagcagtgcggagcgaccctgcccgacgagaaatgccccgtctgtcccaattgcggctggaacaagtgctcgtgacggcggcctgtcgccgtccttgagagccgccggatatccggctccccggaacggggacgctccttttgccttggggggacgcgaagcccggccgtccctcgcgaagatttcatccccgatgggaacaatcccggcggccggccgcccgcctggccgccgcggcgatcgatcccggacggcggggcttgacatcggcgtggataaagcctataagaatactaggaaataataactggaaaaatcgaatcgaagcgattatattatggggaccttatcaaggagaattccatgaaagataaagtcgaagcggctctgaataaaatacggccccagctgcagatggacggcggagacgtcgagctggtcgggatcgatccggacggcgtggtcaaggtgcgcttgaaaggcgcctgcggcggctgcccgatgtcccagatgaccttgaagatgggcatcgagcggatcctcaaaaaggaagttccggaggtcaaggaagtcgtctccctctaaccgcccgcttttcccggccgccgatgaaacgcgtttatctcgatcacatcgccgccgcccccctggcgcccggcgtgctggagaaaatgcgtccgttcttggaggccggattcggcaacccgcaaagccttcattccgacggccaggcggcggcagaggccgtggaggaaagccgggagcgggtggccgccctgatcggggccgccccgccggaaatcatcttcacggccagcgggaccgaagccaacaacctcgcggtcaaaggcctggcccaagcccagcgggccaaggggaatcatctcgtcgtctcggccgtcgagcacgcgtccgtcctgaatccggtcaaaaccctcgagaaatccggcttccaggcgacaatcgtcccggtcgatcgtcaaggacgggtcgatccggccgccgtcgccggcgccctccgcgaagatacgatcctcgtttccgtgatgaccgccaattccgaagtcggaacgatcgagccgatcgccgagatcgtccgggcggtcaaagccaagtctcccggcgtgctcgtccataccgacgccgtcgcggccgcggggaatatccccctggacgtcgaagccctgggcgtggacgccctgagcctttccggaaacgcgttctacgggcctcgagggagcgccgccttgtttctgagaaagggaacgaagctcgttcctcaaatcgaagggggagtccaggaaggcggccggcgcggcgggaccgaggacgtgccggcgatcgccgggatgggtgaggccgcccgcttggcggccgcggcgatgccggaacggacggcctgcatgacggcccttcgcgaccggcttctggacggcctgcctcggcgggtcgagcgcgtccacccgaccgggtcccgggagcaccggcttccttatcatgccagcttctgcgtcgaattcgtcgagggagagtccttgctgctcagcctcgatttcaaggggatcgcggcctcgagcttctcggcctgcacgtccaagtcgctcaaggtttcccacgtcctgctggccatggggctggaccacgccctggcccaagggtcgttgattttcagtttggtcgaaacgacctcggaaaccgacatcgacgccgtgatggacgccttcccgcccgtcgttcagcgtttacgggatatgtcccctctttacaccgagtttctgaaggagacccgtcgatgatttattccgataaagtcatggatcatttccagaacccgcggaacgtcggcaccctccccgacgccgacggagtcggccaggtcggcaatcccgtttgcggcgacatgatgaccttctacgtcaaggtcaaggacgaccggctgaccgacatcaagttccagacattcggctgcggagcggccatcgccgtctcgagcatggtctcggagatggccctcgggaaaacggtccaggaggcgatggacatcaccaacgagaaagtagccgaggagctcggcggcctgcccaagaacaagatgcattgttccaacctgggggcggacgccctgcatgccgccctggagaattaccaagcccggaaggccggaacggcctccggaccggccgccgaagcggccgccggccgggccgtggaaggagcggcccccgatcactgcccttactgcgacgggccggtgcaaggtcccccgaacatgtgttcctgcaaaacctgcgacctcgatctcgtcgaatgcggccattgccatctttacaccaacggggccgaaacccgctgcacccactgcggggcgcagctcgaacggtaatttcatgaccgcgtcgccggcgcctcccggcccttcctcgtggatccggcgggtccgggacctggcccgggagcgcgaggccgtcctcctcgcccacaattaccagcggcccgaagtccaggaagccgccgatttcgtcggcgactcgctggagctcagccggaaggccgccggggtcgaagggcgggtgatcgtcttctgcggcgtccggttcatggccgaaaccgcggccctcctcgccccggataaaaccgtcctcctgccggacgagggcgcgggctgcccgatggccgacatgctcgaggccgaagacctggtcgaatggaaaaaacaatatcccggccggcccgtcgtcctctatgtcaacacgtcggccgcggccaaggccgaagccgacctttgctgcacgtcggccaacgccgacgccgtcgtggcctcgcttccggaagaggagatcctcttcggaccggacaagaacctggccgcttggacccagcgccgcacggccaagcggatcatcgcctgggacggctggtgccatgtccaccagggcatccttccccgggacgttgcggcggcccggacccggcatccgggagccgtcctctgggctcatcccgaatgccgtccagaggtcctggacctggccgaccgcgtcctctcgaccggcggcatggtccgggaggcggcggcctccgcggccgccgacgtgatcatcgcgaccgaatgcgggatgcttcaccgcctccgccgggaccatccggacaaaaggttctttccggtgaaggaaaacgccttatgtccgaacatgaaaaaggtcacgctgccgaaaatcgccgccgccctggagacgatggccccccgggtgaccgttccgccggagatcgccgcccgagcccggcgggccatcgagcggatgatccggctttgaggaccccgagcccgaaatgacgaaagcggagagttcccgcgaaaaaggaaaggacggaacgcctcttccggcggcagaccgccttccggaaatcatccggatcctgaagagggaatacccggatccgaagcccttcctccatttccggacgccgctggaaatgctggtggcgacgatcctttcggctcagtgcacggacaagcgggtcaacctggtcaccccgggattgttcaagaaatatcccgacgcccgggcttacgccgaagccggtccgggcgttctggaaaacgacatccgctcgaccggctttttccgcaataaggctcggaacatccgcggagcggcccgtaaaatcctcgacgacttcgggggcgaggtcccggcgaccatggacgagctcttgacgcttcccggcgtcgcccggaaaacggccaacatcgtcttgagcaacgcctttcataaaaacgaagggatcgccgtcgacgtccacgtcggccgggtctcccggcggctggggctgagcggacacgaggatccggtgaaaatcgagcgggatctcctccgcctcgttccccggaagcattggggcgatttcaatttctgggtggtcagccacggccgggcggtctgccgggcccgcaagccggactgcggggcctgccccctccggcccggctgcccttttccatcgtcgccgcggccgcgatgaacgcctccgggcggccggcggctttgaagcgggcttcggtttcgactacaataaaaacatgaccatccgtccaaccggcggagagaggccgggatcatggtgaggcggttttcattcgacgacgaaaccggggattcaaccggcgtccataaggcgcgcctctggtcgacggccggggacaacgccgtccgctgcgccttgtgcgcccaccgctgcgagattcatcccggccatttcggcgtttgcggagtccgggaaaaccgggccggccggctcgtcacccgggcgtacggcgaggtggtgagcgccggggccgatcccatcgagaaaaagccgtttttccattttttccccggatcgacggctttttcgatcgccgcggccggatgcaacttccgctgccgcttctgccaaaactggcagatttcgcagctgcgcccgatcgacggccgcgcgtccggaggccgccgcttggcccccggcgacatcgtccgcctggccgtggccaacggctgccggagcctttccttcacctatacggagccgacgattttttacgaatacgccctcgacacggccgtcctcggccgggcggccggcctgatgagcacgttcgtgaccaacggttacctgacggcggaggcggtcaaggtgatccgtccttttctcgacgcggccaacgtcgatctcaaattcttccgcgacgaaagctaccggaaaatctgcggcgcccggctccagcccgtctgcgacacgatcgccctgatgcggcggctggggatttgggtcgaggtgacgaccctggtcgtccccggcctcaatgacggcgaggcggagctgcgcgacatcgcccggttcctggccgatgtcgaccgcgacatcccctggcacatcagccgcttccacccggattacgagtaccgggaagccgtcccgacgccgatcgagactctccgccgggcggccgacatcggccgggaaaagggtctccgtttcatctacacggggaacatctcgggggaaatcgagccgacgcgctgtccccgctgccggacgacgctcatccgccggcgcgggttcgaggtgatggaaaaccggctcttaaacggccggtgtccgcagtgcggcgaagctttgcccggcgtcttcccggcggccgccgttccgtcgcccctctgatatcaagaaggagattctcttggccgcatcccatcaaagctcgggcccgatcgccttcgaggttctccgtcaaggccgggccgaaccgtgaaaatcgtcctggccggttataacgtcgaccgggaagctttggacgaagtgctccgagccttccccggccgcctcgacctgacgcctgaaacgctgtcggcggcctatgcccggatttcccgcgacccccgcccggctgatgagctccgccgggccgcccggcgggaagtggaaaaggcccggcggtccaacgcggcgatcattttcaagatgggccaccattccgtggccgagcatgccgttttcaatttcgacctcatggggatcagccgcctggccatcgaggaaatcgaaaaattccgcctctgttcctttaccgagaaatcccagcgctacatcaagcttggagacgattacgtcgtccccgaggaaatcgtccgggcgggcctcggggacctgttcgtcgagacggtccgggctcaaaacgcggcttatcacgacctctatcggatactccggcctcttttttttgaaaaccatcccgccctggcggccgatccgaaacatcacttcctgctggacggctgggccaaggaagacgcccgctacgccgtcggcctggcgaccgaggggcagatcggcctgacgataaacgcccgcaacctcgagctgatgatccggcggctggccgccaaaccgtcggccgagatccgggcgatcggtcttcgcttggccggggaagcggcccgggtcgcgccctcgatcgtccgctatacggaagccgcggcgtatgacgccgaaacggaagaggccttccgggacgaggccgtcgagagcctcgggagccgtccgtccgccgcggccgatcgaagccgccggagcggttccgtctcttccgccgtccgcatggcgggggcgacgcccgaaggcgacgagcgcgtcctggccgctcttttacacgcttcttggggaggatcctacgcccgctgccttcgggaagcccgccgtcttccggttcggaagaaaaaagcgctcttcctccgcgttttcgagcgcatggaattttacgaccttccgccgcgcgcctttgagcacgccgggctgacgttcgagctgaccgtgtcggcgtcctgttacgcccagctcaaaagacaccggatggccaccttgacggcccaggcttacgatcccggcctcggggtgaccgttcccccctcgatcgaggcggccggggaagcgccgcggttccgggacgtcatcgggcggaccgaagcggcttaccggatcctaaaggaggccgccggcccggccgcggcttacgttctgaccaacgcccaccgccgccgggttcttctcgccctcaatctccgggagctcacccatctggcccgcctccgcgaggatgcctccgcccagtgggatatccgccgtctcgcggccgagatgtcggccgccgcccgggcccggttccccctggccgcgatgcttctctgcggcaaggacgcttacccggatgtctacgcgaaaatcttcggccgcccgccggacaagacgcccccgtcctccttgaaaaacgggtagcgttttatccggggccggccgttccagcggacggggaatccgcggctaatcgtcggcgacgacgcggtggatttttttctttccggccttgaggatcatcccgtcgggcccgatgtccgccagggtcagcttccggtcgagggaatcgatcttctcgttgttgaccgagaggccgccctgggcgatcaaccgcttggcttcgccgcgcgagggggccaggccgatttcggcgaagagctcggccggagcgatgccggcttcgaggcgtccccgggccacggccgtcgtcgggagcgaggcggcgtccttttgaccggagccgccgaaggcggcggccgcggccgcccgggcgtcccgggcggcgtcttccccgtgggtgagggcggtcgcctcgtaggccaggatgcgcttagcctcgttgagctcgctgccggcgagcgattcgaggcgctggatctcgccgagcggcaggagcgtgtagaggcgcaggaagcggccgacgtcccggtcgtcggtattgatccaatactggaaatagtcgtaaggcgggcagagactcccgtccagccagacggcgccctgggcggtcttgcccattttcgccccggccgaggtcgtgaggaggggaaacgtcagcgcctcgaccgcggctccctcgacccggcggacgagatcgacgccggccaggatgttgccccactggtcgtcgccgcccatctggagggtgcagccgtaggtccggaacaaggtcaggtagtcataggcctggaggagctggtaattgaactcgatgaaggataagccccgttccagacggatcttgtaggcttcggcggccagcatgcggttgacgctgaaatggcggccgatgtcccggaggaattcgatgtacttcaacggcaggagccagtcggcgttattgaccgccagcgccccggcgccgtcgaatttcaggtaccggtcgagctgagcccggatggattctccaaaagaccggatggtcgtctcgtccaggatctggcgcatctcggtccggccgctcgggtcgccgaccatggtggtgccgcctccgatgagggcgatggcccggtggccggcccgccggaggtggatcatggccatgatcggaaccaggcttccggcgtgaaggctggcggccgtgccgtcgaagccgatatagaacgtcgtctttttctcgtcgagcattttcctcacggccgcttcgtcggacacctgggcgatgaagccgcgagccttcaattcattaaaaatcgattccgtcacgggagtcctctctttcgaacgtctcttttatagcacaggaccggccggacggacaaacgcccgttcccccgaaacgctccggccggcggccggccttgcccggccgtgttgccgatgatagagtgggggcgggagtcggaccgctcatggaaaaacgctaccgccggatgctccgggggatgatggtcaaggaagagggaacccccgacgccccggggcccgcctggtttctttatatcttgaaatgcagcgacggctcgctctacaccggcgtcaccaccgatatcgaccgccggctcatgatgcaccgggaggggaaggcctcgcgctacacccggacccgccggccggtggagctcgtctaccgcgaggagtgcggcagccggtcccaggccttggcccgggagtgcgcggtcaagtccctgccccgggcgaaaaaagaaaggctcttcgacgctccgaggtgacgcccgcggcgcgaaaggcccgccgggaaaagagagccggcccgaggcgctccctcggccggccgccggaaaccggtttcccgctcaaggacctgatcgcccggggcgtcccggtgaaggttcgccgattccgcccggcaagaggcggctttcacaagaatcagccgtacttcaagggagtggagacgtcgagcctgccggaatcgacggcttgggtcgccggcggcgacgaggtgatgatgttttaagcctgcgtttccaccagggagaaagggatggaaagcgattcgtccgattacaggatcgtgacccggcgcccgcggatttcgagccggccttcgaaatacaggcgcgccgcttcgggatagatcttgtgctcctcgaccaggatgcgggcggccaaggtttcagccgtgtcgttttggagaacggggacgacggcctgcagaacgatcgctcccatgtcgacctccgccgagacgaagtggaccgtgcagccggaataacggacgccccagtcgatcgcctgctgctggacgttgaggccgggaaacgacggcagaagagccggatggatgttcaggatgcggttcttgcaggcggcgcagaactccggcgtcaggaccttcatgtagccggccaggcagatcaggtcgatgccccgggcttcaacctcgcggaggatcgcccggtcgtaagccgccttgtcggcgaacgccttggggctcaaggacatcgtcgggagcccccgcccgcgggccgcggccaggccgggcgcgtcctccttgttgctgaagacgagggcgatctcggcgttgatctttccggccgcggccgcgtcggcgatggccgtgaaattcgagccgcggcccgaaagaagcaccatgatccggccgtgtttcttgggactgcggaagacttcctcgctcatgggaccctccttcccccgggggggtcgatctccaaatggtctttcggaacccagcctgttttcccccggtcgtccgttccccaaacccatccggccagctcgccgaggggacggatggtatctccggcttcgaccgaaagctccgtcgcgtcgtaatcccgggttaagaaagcctcttcgccttcccggcggagataggcgtccgggacccagcctgttttcccgtcatcgccgcggccccatacccagcccggccattcgctcgtccggggcagaatcgtcacccgggctccgcgggcgaggcggatcgggtcggaatacggcgtttcgtatcgtttcgcgactcgatacagcgtgcccacggccggtctcaggagggcctctttgcgggcgcgaagaaatcggggatggcgttcatccaaagccggcgggcctcggcgaccggaagatcgacaagaaggcggccggagacccggaagcggagggcgcgtccgcccgttgtcccgacgatccgggcggggacgccccgtttttcggcgatctccaggacgcgccgggcgttttccgggcgggaggtcaacaggatccgggcttggctttctccgaagagaacggcatcgggccggagatccgtctcaaaggacaggtcgcagccggttccttccgggctgtggaaggcgcattcggccgcgcagacggccaatccgccttccgagggatcggcggcggaacggacgagcccggcgccgatcgcttccaggagcgtctcgtggacggcgatttcccgctcgagatcgacggccggcggcgccgcgcctcgttttccatggatgagcttgagatattccgatccgccgaactcctccttgttttcccccagcaggatgaccgcgtccccctcggccttgaatcccggggtgacgagccggtcgatatcctcgatgaggccgacgattcccaggacgggcgtcggatcgacggccgcggcgccggtctcgttatagaagctgacgttgccgccggtcacggcgaggccgaaggcccggcaggcttcgctcagcccctcgacggtctccttgaactgccccatgactcccggtttctcgggattgccgaagttcaggcagttggtcaccccgatcggccgggccccgacgcaggccaggttccggcaggcctcggcgacggcggcttttccgccggtccggggatcgagggccgcataccggccgttgccgtccagggtcatggccaagcctttcttcgagccgcggatgcggaggacggccgcccccgcgcccgggagaagaacggtgttcgtcagaaccatgtggtcatactggccgtagatccattccttgccggcgatggtgggggaggaaaggagccggcggaggacgtcggcgtaatcggcgggcggggggacgggcccggccgcccggggctccggggcggacggccgtttccaaggccgcttgtaggccggacaaaggtcgacgacggccgagacgggaacgtcgacgacgacatccccgtggaagcggcacgtgagccggccgtcgccggtgaccgcgccgatctcgacggcgtcgagatcccacttggcgaaggccgccttgaccgccggaacctggtcgggccgggcggcgatcagcatccgttcctgggattcggacaagaggatctcataaggcgtcatgccttcttcccgctgggggacccgatcgaggtcgatggccgcgcccttgcccgatttagccggcatttcggtggccgcgcaggtcagcccggcggcgcccatgtcctggatcccgacgatgattcgccgctccatgacctcgaggcaggcttccatcaagagcttttccttgaacggatcgccgacctggacgttgggccgcttggcttcagtgtccccgccgaattcctgggaggccatcgaggctccgtggatgccgtcgcggccggtcttggccccgacgtagagaaggacgttgccggcgtcttcggtccgggcgtagaaaatcttgtccttttcggccaagcccaggcagaagatgttgaccaggggattcagagaatagccctcgtcgaaacaggcctcgccgccgacggtcggcacgccgatggaattgccgtaggaggagatgccggagacgaccccttccatgatcgagcggttcttgggattatcgagcggcccgaagcggagggaatccatcagggcgaccggccgggcgcccatggtgaagatatcccggagaatgccgccgacgcccgtggccgcgccctggaaaggctcgatgaaggagggatggttgtgcgattcgatcttgaagacgatgacccggccttcgccgatgtcgatgaccccggcgttctccccggggccctggacgacgttgggggcccgcgtcggcagcgtcttgagaaagaccttggagctcttgtacgagcagtgctccgaccacatggccgagaagaggccgagctcggtcaggttgggttcccggccgaccagcttgacgatgaggccgtactcgtcggcggtcaggttgtgccgggccaaaaccgtgtcgtcgtggaggcgcgttttcatggcctgttctcgagaagggacgtcaggacgacgagaccgtcgacgctgccgagaaccggctcaacggcccgttcggggtggggcatcagcccgcagacgtttccctccttgttgatgagtccggcgacggcgtgaagcgagccgttgacgtcggccccctcggtcagagcgcccgagggggcgcagtaccggaagacgacttggccgttgtcctcgacctccttgagcgtctcgggcggagcgtaccagttgccgtcgaaatgggcgatcgggatgcggagaatctgccccgggcgggcgttccgggtgaacggcgtccattcgttttcgacccggatcgtcacctgccggcagaggaatttcagcttcttgttccgaagcatggccccggggaggagattgagctcgaggaggacttggaagccgttgcagatacccaggaccaggccgcccttggcggcgaaggcgcggacttcccgcatgagcggcgagaaccgggcgatcgccccgctccggaggtaatcgccgtaggagaacccgcccgggaggatgacgcagtcgacgccttggaggtcgtgatccttgtgccagaggtatgtcgtcggttgtcccaggacgtcccggcaggcgtgaaaggcgtcggagtcgcagttggatccggggaagacgaccacgccgaatttcacggatgcctcctcagtcttcgaggatctcccaggaggatttctcaatgaccacgttggccaggactttgccggcgatctccggcagcaggcgctcggcttcggcccgggagacgccccggagctcgatctcgaagaccttgccctggcggacgtcccggacggcttcgtagccgagggtgtgcagagcgttgcggacggcctggccctgcgggtcgaggaccgaatccttgtaggaaaccaggattctagctttcacgggagagcacccgcttgaagatgtaatcgatcttctcgaggtaggggtcgaggctgaagcacgtttcgatttcggccggggagagccgctcccggatccgggggtcggccaggacgagggctttgaaatcgaggttttcctcccaggttttaaggctgtttctctgaacgagggcgtaggcctcctcgcgggtcaagcctttccgggtcagggccagcaggacgctctgggagaaggtcaggccgcgggtcgcgttgatattggccttcatccggtcctttcggacgacccagtgggagatgatatcgatcgcctcggcgagcatgaaatccgtcaggatgaacgagtccgggaagatgatccgctcggccgaggaatgggaaatgtcccgctcgtgccagagagggatgttctccagggccgtctggacgttcgcccggacgaggcgggccaggccggccatccgctcgcaccggacgggattcttcttgtggggcatcgaggaggagcccttctggcccttggtgaacggctcctcgagctccagaacctcgcttctctggaggtggcggatctcgacggtgaatttttccagcgacgcggcgatcagggcgagcgcgccgatcgcctcggcatggcggtcgcgctggaggacctgggtggagaccggagcgggcttgaggccgagcttcttgagggccaggacctcgacgcggggatcgagatggatgtaggtccccaccgcgccggagatccggccgacgctcatgacctcgaccgcccggtcgatccggtcgagatgacgcttgatctcctcgtaccagaccaggaccttgaagccgaaagtcaccggctcggcgtggacgccgtgggtccggcccatgcagacggtcttcttatgcttgagggcttccttccggaggaccttcttgagggtgaggaggcgggcgcggacctggaggagcgaccggcggaccaggagcgagagggccgtgtcgacgacgtcgtaggaggtcaggccgagatggatatagcggccgtccggcccgactttttcattgaccgccgtcaggaaagcgatgatgtcgtgcttgacgacacgctcgatctcatcgatccgcttgatgtcgaaggccgccttggccttgatcgtccggagggacgaggccgggatcttccccagcttgttccaggcctcgcagacggcgatctcgaccgcaagccaggtccggtagcggttctcctcggtccaaaccgcccccatttcgggattcgtgtagcgttcgatcatgggtcacgttccttgcggggggatgggcgggagcatcataccaacagggggcgggggagtcaatttcagccgcggtcgaccagcgtgattccgaaatcgtccagggtgaccaggcgttttttgtaaaggcgcccgacggccgttttgaaagcgttcttgctcactccgaaaaggcggccgacgaattcggccggcgatttgtcggtgacctccaggaagccgtcgttggcccgaagcgcgtccaggatccggccggccagctcgtcgacgccctcggggcccggcttgcccaagcggaggtcgatcttcccgtcgtcccggatcttccggacgtatcccttgacccggtcgcccggccggagctcccggaagacctcgtttttatagagaatgccgccgtgggaattatcgatgaccgccttgtagcccagctccgtccggccgtaaatcaacaggtcgacttcccggccggcctcgaagggcgggggcgtcttggccagatgcttgtcgatcttggccgaggcggcgatccgccggctggcctcgtccaggtagacatggacgacgtattttttcccggccttcatcggcggccgttgctcgctccaggggacgagaaggtccttggggaggccccagttcaggaacgcgcctgtgggattgaccgcgaccgcctcgagaaaggcgaaatccccgacctgggccaggggcttttccgtcgtggcgatcaggcggtcctcggaatcgaaatagaggaagacgtccaggcggtcgccgggggccgctccggccgggacgtagcggcgggggaggaggatttcgccgaggcctcccccgtcgagatagacgccgaaggcgaccgtcttgatgatcgccagcgagtttcgttttccgatttcggccattccggagtcactatacccgccgggcgcgggggatgcaaacgcggcggcgtcggaacgccgcgggggcctcggttattgagtcgctttgccgctttcggagtctgggaaatgggcgtgagccgggctcttcgccgcctcgtagatccgttcgacgtaatggacgaaggcgacataggcttgaacgtaggcccgccccttctcgacatcgttctcttcgtacgctttcctttcgaggacttccttgaattgtcccccggctccctcccggacgagatccgacaggagattcagaagatcctgggccgaaccgctctcaacggcccggtcggcggccgggatggccggcccgaggtctcgaccggcgggtttcaacccggtgtaaggcgctccctccccggcccggtgaagacggacgagcgtctcgaagaaatacatgtcggccaactccgcggcctgttcgctcaatttccggacggacagcgttttctcaaaggcctttatcacggcctcctcgtcctgcttatgtacccagatcaaaacgagacggacctctccggtttccagggctttttgggcggccttgacgaccggaccgtccatcccgtcgcaatgggcccggagaagcggagccgcgatgatcgggagaaagaggccgagagtcaggagaaatcggatgacgcttttccttttcattttaatcttcctttttaagacaggtattcttccttcaagcggtgaaggaaggcgtggaattcctcgtggcggcccgctccgacgacctcgtcctcgatcttctcaaagcccgcttccagcttcttccagaccccggccggcaaccggctctcggccaggggatagaggacgttgtcctccttttcgatatggcgggccaggagggaggcgtactcgcgcgcgttttgggcgtattcccggccggacgttcttccgcccttccgatactcgagaaaggcggcgcccatccctttcacatacatccgtccttccttgtgctcggctaacattacgccgagcggcccgccttcgcggggaacccccgcccgctccatggccggaaacagaagatcctcttcctttccgtggtggcaccggtcgacgaagaccctcagaaattccaggagcccgccgaggtgatcttcctcgacgctgaccccttcctccaggcgccgggccgtctcctccaggattttcagggccagcttgacggccgcgtgctcgtttttcagatcttcggtcggcttcatgtcgccctccttatcgaaatggaaatctccgcttcccgcgccgccgcggacgaagcgccggcatttgaggcggcggattttcggtccggtcgaatccctccggcgccgtcaacgccgcggacgccgtcgaaaacgctttatctcggatgaatttttttcaacaccgtttctgcatgattcaatataggttcggggcggcggtccgtcaagccgggacggaggacatcctgcttttgacaggcgcggccagcctcgtgtaccctctggccatcgcatccgcccatgaccggccagaaaggaattccatgaccccctcatcccgtcgccgtccgtccgcccttcttttgatcgccttgatcgccggatgcctggttctggccgtggactgcgcgcccggcccggcctcggttcccgccgaccttgtcctgaaaaacggcgtcttttacaccgtcgacgcctcttcgagccgggccgaggccgcggccgtcaaggacgggagattcgtctatgtcgggagcgactccggcgcctccgccttcatcggtaaggcgacaaaggtcgtcgacctggagggcaagctcgtcctgccggggttcatcgacagccacgcccacatcatcagctccttccggcatttcttcgagctgaacatcttcggccggacgacggcggaggaggtccagaaagcgatccgagactacgccgcggcccgtcccggggccgaacggatcagcggccggggatggagcaacacggcgttcccgaaaacggggcccgaccggaggatcatcgatgccgtcgtcccggacatccccgtctgcctagcctccgaggacggacacagccgttgggtcaactccaaggccatggccctggccgggatcacaaaggagacgaaaaatccgcccggcggctttatcgagcgcgacccggcgacgggggagccgacggggacgctccgggaaagcgctcaggatcttgtcgccggactgttcccgtcttacaccgtcgatcaattgaagcaggggatcgaggcctaccaggggatggccgcggccttcgggctcacgaccgtccatgaggcttcccttgattcctggagcagcgagatccccgcctccgagatccacgcggccagggtggttctcaccctgttcaggggaaagacggtctacgcggccggcgaaggcgtcgagcgccgatgaacccgagaatcaagcttctccgcggcgacatcacgaagattgcggccggggcgatcgtcaacgccgccaacggttcgcttttagggggcggaggcgtggacggggcgatccaccgggcggccgggccgggcctcctggccgagtgccggacgctcggcggctgcgagacggggaaggcgaagctcaccaagggatacaacttgccggcgccctatgtcatccacgccgtcggccccgtctggaggggcggaaccggcggcgaagaggcgctcctggccggggcgtaccggagcgccttggatttggccgcggagaacggaatccggtccgtcgcctttcccaacatcagcacgggcgtttatggatacccgaaggataaagccgcggctgtcgcgatccggacggtctcgaatttcctggacgggcatccggagatggacaaggtgatcttcgtctgcttcgacgaggacaatcaccggttgtacgaacggaggctcggaggatagcgggcggatccttttttccgatagggaagcgcgttgattgtcttcggacaagggcggcgggaggcgctccggtctcctgttcagtcccgcccgttttctcaggttcgggcagacggggagccggaggcgccaggagaagggaaaagccttgccgccggacccccggagggccggggatccggcggccggcggaaaccggctcttacttgatcggtctcatctggtatttttcgtaaaggccgtcccagtagttcttcatgtcgatgtgacggccgccgatgaacaggtgccggacttcggagcgcgtgtcgagcggatcgcccgtggtgataaagaggtcggcgtccttgccggtctccaggctccccagccggtcttcgactccgaagatccgggccgggttgatggtcaaagccttgatcgcctcctcgtggtcgagcccgtaggccacggcccgggcggcgtgatagggaaggtccttgcccgcggccgggtcgtctcccgaggagaaacagatcggaaccccggccttgaccagctcgatcacgtttcggaagggcgcgtcgtagccgtcttccggctcgacggggccgacgtacagggaatcgatgatgaccgggatcccggcctccttgattttcgaggcgactttgaatccctggctgcagccccggaagacggccttgagcttctcctccttgatgaacttgagggccagctcgatgtccttttccttttccacggagaggatgaccggaagcgttccgtccaggacaggggccagggcctcgaacttgcggttgagggccggcgcctcgagccgcgaatcggccgcggccgccttcttgaggtcgagataacggcgggcttccttgaggtattccgatattttctccaccagtttggacgtgacgtcgaccttgctctcctgtgccgtcccgccgccctcgcccccggccggccggggagacatggggaagttgaccagggaggtggcggtttccttgagggccatctcggccacggtccagccgtccatgcggacgagagacgactggccggggaacgttccgccggccggagcgaccagcgccgccgtggtaccgttgatccggctcgttccgaagtggatggacgcgggattgatggcccgggcggcgagaacctcgggattttccttgcccatttcccggacatcgaccgtgccggagacggccgaaatctcgaccaagccgaaatgagtgtaggcgtcgatgaacccgggataaacgaactggccggccgcgtcgatgaccagggcctcggccggcgcgtccacgctcgttccgagggcggcgatcttgccgtcccggatgagaagctgacccgcggcgatcggcgcgccggtgaccggcacgagggtcgcgttcttgatcaggatcgtccggccgtcctccgctccggccggtccggaaaagacgagaaccgccagggcggtgatgacgaagacaacgagaagaaatatctttttcatggtcgtctcctcaggactttttttccttgggggcctcggccgccgcttttttcgcctcctcggctttccggcggtcgtcgagatacttggcccggtcgaagtagactttcccgtcgacgatcgtcatctggcagacggtgtagggatcaaggggatggcggttgaaaacggcgatgtccgcgtccttgccggcctcgagcgttccggtgagcttgtccactcccatgatgatcgccggattgagggtgatcgttttgagagcctcgagctcgctcagccccccgaagcggacggtcttggccgcgtccaggaagaggtggcgcatccgttccgcatcgtcggaattgagggctaccaggacgccccgcttggccatcagggccgccgaatggggcatcgtgttgaaggcctcccatttataagcccaaaaatcggcgaaagtcgaaacggccacgttgttttcgacgagctcgttggtgattcggtagccctccaggccgtgctcgaaggcagccagcttcaccccgtactcccggcagaggcggatgatcgaggccatttccgggccctggtaggcgtggcagcggacccacaacttgccccggaggatgtcggccaccgcctccaggcgatagtccttccgcggcggcagggggacggccgcgcccttccggccccgggtctccttgatcttcttttcataggtttcccaggttttcatatacgcgcgggcttggtcgaattccaggcggatggattcctccacgcccatgcgggaccggggatagcggggtttgcccgcgcccgaaaagttcgtttgcttggggttttcgcccagggcccacttgctcgtcaggggcgcgcccttgaacaggaggccctcggcgtccgctccccaccgcagcttcaggcagacgcctcggccgccgatgggattggccgagccgtgggtcgtatgaatcgaggtcacgccgcccgttaaggcgtagaaaatattcaggtcctcgggattgagaacgtcccggatgtcgacttcggccgtgatgagatcgcccgtttcattgactccgccctcgatggcgatatgggaatgggagtcgatgatcccgggcatgatccaccgccccttgaggtcgatgacttccgttccggcctccgccggaagatccttgcccagcttggcgatcttggtcccgatgatcaggatgtcgccgtcgaaattctccccggcgatgggaagaacgtgggcgtttttgagcaggagccgcgcttcggcggccgggagcgcggcggcggccgctagaagcccgatcagggcgagaataaagaatttctttttcatggctttctccaaggcctcaggcgggattccgctttcccgtgaactcggtcgagccggatgtcccttgaacggccgtcccccgcatcgtgtctccggtcaccgtggccgagaaatagagatcgatgtcctgtccgccgacgctggcgttcacctcgaaatagacctggtcggccgaaaccgatccgccggtgaaatcgaacgccccgaacggcgtggtcatcttccccgacagggaggcttcctcctgggcgaaatccacggtcagggtcagcccggcttcggggagggacagctcccagcggccggagacgttgaccgtcggcttttcgccttccttggctttgggtttcgtgaagtcgaacagccggccgtcggcgaaaacgtatttgaccttgggctccttgaccaggggatccccctcgaccagaacgaggttggcgatccggccggcctcgaccgcgcccagggccttatccaaacccaggaaggcggccggagaggacgtcagggcttccagggccttgtccggggacagcccggcctcgaccgctttttggacgccctccatgaagctcttgggatcgtccgtgccgagggaggagaaagcgaacgggatgccggctgaggccagggcggccggattccgcggatagaactccttttcggctttttccttttcagccttgcccagctggctgaagcggctcgtcgccggcgccttgaaggcgaccgtgcagagaatccgggccttggccttctttaattcggggacgactctttgggcttcgccgcccaggtcgcagagaaaatagtccagcttcagctcctcggccagggccagcgaccgccggatgtcatgctggttgttgcagaagaaaacgacgggtttcttgccagaggcgtactcccggagaatgtcccaccggccgttatagacgggccggcggatgcccgcgggcatcttcgcccagagatcggcgttcaggccgtaatgcccgatgtcggcgaattcctggcgaaagaaggccaccactcccatgagcgagttcggatagaccatgaaggaggcgggggcataacccaggccgagccaggtgtccttgagcaggagggctttattcttgtcctccgagctgagggagaagagcgaggcccgcccggacaaaacgcccttggacggaatggcttggacggcggtcaagccgagtttatgatatttttcgagggtcgacttgcccaggacggcgaagtcgaacgcccgaagctccggcgtcaggccgcggtccttgtccgtgaactcgcccgaatagaacttcgccgggtcgaatttttcctcggggagcttgagcagcgactggcccaggccgtcgatgaggcccgggtgcagggtgagagcgctcccgtcgatgacctcggcgtcgggcggaatcgcggtttccgcgccgatggactcgatgagcccgccgcggatgatcacggtcgccttgggcaggacgggtccgcccggcgtcaccacgcggcaatccttgacggcccagacttcgtgcagggactcttcggacgcgaggagcggaacgctcgcgagccagagacccaggcacaggaacagggaggccgggggtaatctcctcttggccatcatgcctccttctggcgggtggaatagtcgttcaagcgtcggaagggaacatcatccggacgcgaacgttgatcttgattatatacgattgcggctggaaaaaggttcgtatggaaaggaccggaacacgggatgttttgccccgcggccgctccgcggggaccccggcggaaatttgaagcggcggacgggcggttccgtttgacaaggcccccctggggttctatattcgagaaaagcaaaaatcggcggaattgcggaggaacggccatgaagaagattttccggatcggggcggccgccgccggccttttggtttacggggcggccggaggccatggtttttcggatgttttcaagacggcggaaggggatttgaaaatctctcttcccggccacgcgaccgtttttttcgagttcggggggacaaccgtctgggtggatccgactaagccgtacgtctttgttcccgaccatccgcccaaggccgacgtgatcctggtttctcatgagcacggcgatcatcttgatctcgaggggatcgaggccgtcaagaaaacagggacgaggatcatctgtccggccgtgtgcgccggcccgctgcccggcggcgaaatcctggccaacggcgggaaaacggcggttctcggcgtctccatcgaagccgtcccggcttacaacctcgccgggatgcggagtcccggcgtgccgttccaccccaagggcgcgggcaacggctatgtgctgaccttcggcggcttgcgggtttatgtggccggcgatacggagaacgttcccgaggtcaaggccctgaagaacatcgatgtcgccgttctgcccctgatgacgccctacacgatgaccgaggagatgctgtccgacgcggcccgggccttcaagccggacgtcctgtatgtctaccatacccggaccgaggatttttcgaagctgagaaatctcctgaaggattccggcatcgatctccgcctcccgtcctgacgtccgcggggaaattttctgcaacggggcggagcggaaacgacccatcaaaaccgggcggacggcggtccgtcgaaatctttttccgcccgccggacctcggcgacaaaggcggcgaccttatcgaagtcctttttgaaccggacgggtttcccttcccggtccagggcgttggtcagggtgcagctgtcggccccggccggacgaacgcttcgcatggattcatagacgttctccggcgacaagccgccggccaggatgacgggaatccggcttgcccggacgattttcgcggcccggtccaggtccgaacgccggccggtgatgcccacgaagccctcgaccggctcccggcccagccaggtgtcgatcaggaaaccatcgctcgaatcctccagggcggccgcgatttccagggcgggaaagcccggaagccggcccgcttccggaaccggaagggtccggacgattccgattccagggaatctttccctgaaacgatgttgcttttcggcggcgggccgcaggtcgtgcggccggccttgctcgtcggtcaaggcctcgcagaaatgaacataatcgggccggagaatatccatcaccgaaaaaagcttgttttcattggaaaaaagcggaatcagggagcttttcgcgtctgttccgcggacgagctcgacgacctcccggatccggctccgtccccggtccgtttccgaaaggatcacgcttccgagacggtccacgcccagggcgaggcagcgctccgcttcctcgggcgtctggatttcatagatttggacgatcatgatttttcggaaaaagactatacgtttccgccggcgtggggtcaatggggaaagccccttgacatcaggtttgcttttcgctaggatacttccgctgcttcgtatccttttgcttctacattaagaaaaaagtctggaaagcaggacttttttcggaaagatgcgccgctggcggtgcgtcttttttccttttgggagaggtttttttgccagcgtagctcagctggtagagcggctgatttgtaatcagcgggtcgggggttcgattcccttcgctggcttaggagcatctgctgaggcggataaagcatgaaagccgggcaggtaccaaagtggttaaatgggacgggctgtaaacccgttgcggaaacgcttcgaaggttcgaatccttccctgcccagaataacgacgcgggaatagctcagttggtagagcggtggccttccaagccatctgtcgcgggttcgaatcccgtttcccgctcttaaggcatttttcgtggccgcccacgtagctcagttggtagagcacgtccttggtaaggacggggtcaccagttcaactctggtcgtgggctttttcgaaatacaaccgagcagctcaacgccggaacgataggaggacatgatggcaaaggcgaaattcgagcggacgaagccccatgtgaacgtggggacgatcgggcacattgatcacgggaagacgacgttgacggcggcgataacgaaggtgctggcgacgaaa
